(19) United States
(12) Patent Application Publication
(10) Pub. No.: US 2009/0214546 A1
(43) Pub. Date: Aug. 27, 2009

(54) Novel therapeutic targets in cancer

(76) Inventors: David W. Morris, Emeryville, CA (US); Marc S. Malandro, Gibsonia, PA (US); Albert Lai, Emeryville, CA (US); Chistin Tse, Libertyville, IL (US); Ali Fattaey, San Francisco, CA (US)

Correspondence Address: NOVARTIS VACCINES AND DIAGNOSTICS, INC.;CORPORATE INTELLECTUAL PROPERTY-R338, P.O. BOX 8097, EMERYVILLE, CA, 94662-8097, US

(21) Appl. No.: 11/547,676

(22) PCT Filed: Apr. 27, 2005
(86) PCT No.: PCT/US05/15467

§ 371 Date: Feb. 23, 2009

(30) Foreign Application Priority Data
Apr. 27, 2004 (US) 10833833

(51) Int. Cl. A61K 39/395; C12Q 1/68; G01N 33/53; C07K 14/00; C07K 16/18; A61P 35/00

(52) U.S. Cl. 424/139.1; 435/6; 435/7.1; 530/402; 530/387.9; 530/387.3

(57) ABSTRACT

The present invention relates to novel sequences for use in detection, diagnosis and treatment of cancers, especially lymphomas. The invention provides cancer associated (CA) polynucleotide sequences whose expression is associated with cancer. The present invention provides CA polypeptides associated with cancer that are present on the cell surface and present novel therapeutic targets against cancer. The present invention further provides diagnostic compositions and methods for the detection of cancer. The present invention provides monoclonal and polyclonal antibodies specific for the CA polypeptides. The present invention also provides diagnostic tools and therapeutic compositions and methods for screening, prevention and treatment of cancer.

### CROSS-REFERENCE TO RELATED APPLICATIONS

[0001] This application is related to the following U.S. Applications: U.S. Ser. No. 10/034,650, filed Dec. 20, 2001; U.S. Ser. No. 10/035,832, filed Dec. 26, 2001; U.S. Ser. No. 10/004,113, filed Oct. 23, 2001; U.S. Ser. No. 09/997,722, filed Nov. 30, 2001; U.S. Ser. No. 10/085,117, filed Feb. 27, 2002; U.S. Ser. No. 10/087,192, filed Mar. 1, 2002; U.S. Ser. No. 10/322,281, filed Dec. 17, 2002; U.S. Ser. No. 10/322,696, filed Dec. 17, 2002, U.S. Ser. No. 10/331,053, filed Dec. 26, 2002; U.S. Ser. No. 10/330,773, filed Dec. 27, 2002; U.S. Ser. No. 10/367,094, filed Feb. 14, 2003; U.S. Ser. No. 10/388,838, filed Mar. 14, 2003, U.S. Ser. No. 10/417,375 filed Apr. 15, 2003, U.S. Ser. No. 10/461,862, filed Jun. 13, 2003, U.S. Ser. No. 10/663,431 filed Sep. 15, 2003, U.S. Ser. No. 10/669,920 filed Sep. 23, 2003, U.S. Ser. No. 10/670,914 filed Sep. 24, 2003, U.S. Ser. No. 10/674,575, filed Sep. 29, 2003, U.S. Ser. No. 10/676,684 filed Sep. 30, 2003, and U.S. Ser. No. 10/692,382 filed Oct. 22, 2003, all of which are expressly incorporated herein by reference in their entirety.

### DESCRIPTION OF ACCOMPANYING CD-ROMs

[0002] Tables 1-16 are filed herewith in CD-ROM in accordance with 37 C.F.R. §§ 1.52 and 1.58. Two identical copies (marked “Copy 1” and “Copy 2”) of this CD-ROM are submitted.

LENGTHY TABLES
The patent application contains a lengthy table section. A copy of the table is available in electronic form from the USPTO web site (http://seqdata.uspto.gov/?pageRequest=docDetail&DocID=US20090214546A1). An electronic copy of the table will also be available from the USPTO upon request and payment of the fee set forth in 37 CFR 1.19(b)(3).

[0003] Contents of the CD-ROM disks submitted herewith are hereby incorporated by reference into the Specification.

### TECHNICAL FIELD OF THE INVENTION

[0004] This invention relates generally to the field of cancer-associated genes. Specifically, it relates to novel sequences for use in diagnosis and treatment of cancer and tumors, as well as the use of the novel compositions in screening methods. The present invention provides methods of using cancer associated polynucleotides, their corresponding gene products and antibodies specific for the gene products in the detection, diagnosis, prevention and/or treatment of associated cancers.

### BACKGROUND OF THE INVENTION

[0005] Oncogenes are genes that can cause cancer. Carcinogenesis can occur by a wide variety of mechanisms, including infection of cells by viruses containing oncogenes, activation of protooncogenes in the host genome, and mutations of protooncogenes and tumor suppressor genes. Carcinogenesis is fundamentally driven by somatic cell evolution (i.e. mutation and natural selection of variants with progressive loss of growth control). The genes that serve as targets for these somatic mutations are classified as either protooncogenes or tumor suppressor genes, depending on whether their mutant phenotypes are dominant or recessive, respectively.

[0006] There are a number of viruses known to be involved in human cancer as well as in animal cancer. Of particular interest here are viruses that do not contain oncogenes themselves; these are slow-transforming retroviruses. They induce tumors by integrating into the host genome and affecting neighboring protooncogenes in a variety of ways. Provirus insertion mutation is a normal consequence of the retroviral life cycle. In infected cells, a DNA copy of the retrovirus genome (called a provirus) is integrated into the host genome. A newly integrated provirus can affect gene expression in cis at or near the integration site by one of two mechanisms. Type I insertion mutations up-regulate transcription of proximal genes as a consequence of regulatory sequences (enhancers and/or promoters) within the proviral long terminal repeats (LTRs). Type II insertion mutations cause truncation of coding regions due to either integration directly within an open reading frame or integration within an intron flanked on both sides by coding sequences. The analysis of sequences at or near the insertion sites has led to the identification of a number of new protooncogenes.

[0007] With respect to lymphoma and leukemia, retroviruses such as AKV murine leukemia virus (MLV) or SL3-3 MLV, are potent inducers of tumors when inoculated into susceptible newborn mice, or when carried in the germline. A number of sequences have been identified as relevant in the induction of lymphoma and leukemia by analyzing the insertion sites; see Sorensen et al., J. of Virology 74:2161 (2000); Hansen et al., Genome Res. 10(2):237-43 (2000); Sorensen et al., J. Virology 70:4063 (1996); Sorensen et al., J. Virology 67:7118 (1993); Joosten et al., Virology 268:308 (2000); and Li et al., Nature Genetics 23:348 (1999); all of which are expressly incorporated by reference herein. With respect to cancers, especially breast cancer, prostate cancer and cancers with epithelial origin, the mammalian retrovirus, mouse mammary tumor virus (MMTV) is a potent inducer of tumors when inoculated into susceptible newborn mice, or when carried in the germ line. Mammary Tumors in the Mouse, edited by J. Hilgers and M. Sluyser; Elsevier/North-Holland Biomedical Press; New York, N.Y.

[0008] The pattern of gene expression in a particular living cell is characteristic of its current state. Nearly all differences in the state or type of a cell are reflected in the differences in RNA levels of one or more genes. Comparing expression patterns of uncharacterized genes may provide clues to their function. High throughput analysis of expression of hundreds or thousands of genes can help in (a) identification of complex genetic diseases, (b) analysis of differential gene expression over time, between tissues and disease states, and (c) drug discovery and toxicology studies. Increase or decrease in the levels of expression of certain genes correlate with cancer biology. For example, oncogenes are positive regulators of tumorigenesis, while tumor suppressor genes are negative regulators of tumorigenesis. (Marshall, Cell, 64: 313-326 (1991); Weinberg, Science, 254: 1138-1146 (1991)).

[0009] Accordingly, it is an object of the invention to provide polynucleotide and polypeptide sequences involved in cancer and, in particular, in oncogenesis.

[0010] Immunotherapy, or the use of antibodies for therapeutic purposes has been used in recent years to treat cancer. Passive immunotherapy involves the use of monoclonal antibodies in cancer treatments. See for example, Cancer: Principles and Practice of Oncology, 6^{th} Edition (2001) Chapt. 20 pp. 495-508. Inherent therapeutic biological activity of these antibodies include direct inhibition of tumor cell growth or survival, and the ability to recruit the natural cell killing activity of the body's immune system. These agents are administered alone or in conjunction with radiation or chemotherapeutic agents. Rituxan® and Herceptin®, approved for treatment of lymphoma and breast cancer, respectively, are two examples of such therapeutics. Alternatively, antibodies are used to make antibody conjugates where the antibody is linked to a toxic agent and directs that agent to the tumor by specifically binding to the tumor. Mylotarg® is an example of an approved antibody conjugate used for the treatment of leukemia.

[0011] Accordingly, it is another object of this invention to provide antigens (cancer-associated polypeptides) associated with a variety of cancers as targets for diagnostic and/or therapeutic antibodies. These antigens are also useful for drug discovery (e.g., small molecules) and for further characterization of cellular regulation, growth, and differentiation.

### SUMMARY OF THE INVENTION

[0012] In accordance with the objects outlined above, the present invention provides methods for screening for compositions that modulate cancer, especially lymphoma and leukemia. The present invention also provides methods for screening for compositions which modulate carcinomas, especially mammary adenocarcinomas. Also provided herein are methods of inhibiting proliferation of a cell, preferably a lymphoma cell or a breast cancer cell. Methods of treatment of cancer, including diagnosis, are also provided herein.

[0013] In one aspect, a method of screening drug candidates comprises providing a cell that expresses a cancer-associated (CA) gene or fragments thereof. Preferred embodiments of CA genes are genes that are differentially expressed in cancer cells, preferably lymphatic, breast, prostate or epithelial cells, compared to other cells. Preferred embodiments of CA genes used in the methods herein include, but are not limited to the nucleic acids selected from Tables 1-16 (human genomic sequences of SEQ ID NOS: 4, 10, 18, 26, 34, 44, 50, 60, 82, 88, 112, 122, 128, 136, 154, and 170, and sequences of SEQ ID NOS: 5, 11, 13, 19, 27, 29, 35, 37, 39, 45, 51, 53, 55, 61, 63, 65, 67, 69, 71, 73, 75, 83, 89, 91, 93, 95, 97, 99, 101, 103, 105, 107, 113, 115, 117, 123, 129, 137, 139, 141, 143, 145, 147, 149, 155, 157, 159, 161, 163, 165, 171, and 173 corresponding to the human mRNAs generated therefrom). The methods further include adding a drug candidate to the cell and determining the effect of the drug candidate on the expression of the CA gene.

[0014] In one embodiment, the method of screening drug candidates includes comparing the level of expression in the absence of the drug candidate to the level of expression in the presence of the drug candidate.

[0015] Also provided herein is a method of screening for a bioactive agent capable of binding to a CA protein (CAP), the method comprising combining the CAP and a candidate bioactive agent, and determining the binding of the candidate agent to the CAP.

[0016] Further provided herein is a method for screening for a bioactive agent capable of modulating the activity of a CAP. In one embodiment, the method comprises combining the CAP and a candidate bioactive agent, and determining the effect of the candidate agent on the bioactivity of the CAP.

[0017] Also provided is a method of evaluating the effect of a candidate cancer drug comprising administering the drug to a patient and removing a cell sample from the patient. The expression profile of the cell is then determined. This method may further comprise comparing the expression profile of the patient to an expression profile of a healthy individual.

[0018] In a further aspect, a method for inhibiting the activity of a CA protein is provided. In one embodiment, the method comprises administering to a patient an inhibitor of a CA protein preferably selected from the group consisting of the sequences outlined in Tables 1-16 (SEQ ID NOS: 6, 12, 14, 20, 28, 30, 36, 38, 40, 46, 52, 54, 56, 62, 64, 66, 68, 70, 72, 74, 76, 84, 90, 92, 94, 96, 98, 100, 102, 104, 106, 108, 114, 116, 118, 124, 130, 138, 140, 142, 144, 146, 148, 150, 156, 158, 160, 162, 164, 166, 172, and 174).

[0019] A method of neutralizing the effect of a CA protein, preferably a protein encoded by a nucleic acid selected from the group of sequences outlined in Tables 1-16 (human genomic sequences of SEQ ID NOS: 4, 10, 18, 26, 34, 44, 50, 60, 82, 88, 112, 122, 128, 136, 154, and 170, and sequences of SEQ ID NOS: 5, 11, 13, 19, 27, 29, 35, 37, 39, 45, 51, 53, 55, 61, 63, 65, 67, 69, 71, 73, 75, 83, 89, 91, 93, 95, 97, 99, 101, 103, 105, 107, 113, 115, 117, 123, 129, 137, 139, 141, 143, 145, 147, 149, 155, 157, 159, 161, 163, 165, 171, and 173 corresponding to the human mRNAs generated therefrom), is also provided. Preferably, the method comprises contacting an agent specific for said protein with said protein in an amount sufficient to effect neutralization.

[0020] Moreover, provided herein is a biochip comprising a nucleic acid segment which encodes a CA protein, preferably selected from the sequences outlined in Tables 1-16 (SEQ ID NOS: 5, 11, 13, 19, 27, 29, 35, 37, 39, 45, 51, 53, 55, 61, 63, 65, 67, 69, 71, 73, 75, 83, 89, 91, 93, 95, 97, 99, 101, 103, 105, 107, 113, 115, 117, 123, 129, 137, 139, 141, 143, 145, 147, 149, 155, 157, 159, 161, 163, 165, 171, and 173).

[0021] Also provided herein is a method for diagnosing or determining the propensity to cancers, especially lymphoma or leukemia or carcinoma by sequencing at least one carcinoma or lymphoma gene of an individual. In yet another aspect of the invention, a method is provided for determining cancer including lymphoma and leukemia gene copy numbers in an individual.

[0022] The invention provides an isolated nucleic acid comprising at least 10, 12, 15, 20 or 30 contiguous nucleotides of a sequence selected from the group consisting of the polynucleotide sequences SEQ ID NOS: 5, 11, 13, 19, 27, 29, 35, 37, 39, 45, 51, 53, 55, 61, 63, 65, 67, 69, 71, 73, 75, 83, 89, 91, 93, 95, 97, 99, 101, 103, 105, 107, 113, 115, 117, 123, 129, 137, 139, 141, 143, 145, 147, 149, 155, 157, 159, 161, 163, 165, 171, and 173 shown in Tables 1-16, or its complement, or an expression vector comprising the isolated nucleic acids and host cells comprising them.

[0023] In some embodiments, the polynucleotide, or its complement or a fragment thereof, further comprises a detectable label, is attached to a solid support, is prepared at least in part by chemical synthesis, is an antisense fragment, is single stranded, is double stranded or comprises a microarray.

[0024] The invention provides an isolated polypeptide, encoded within an open reading frame of a CA sequence selected from the group consisting of the polynucleotide sequences of SEQ ID NOS: 4, 10, 18, 26, 34, 44, 50, 60, 82, 88, 112, 122, 128, 136, 154, and 170 shown in Tables 1-16, or its complement. The invention provides an isolated polypeptide, wherein said polypeptide comprises the amino acid sequence encoded by a polynucleotide selected from the group consisting of SEQ ID NOS: 5, 11, 13, 19, 27, 29, 35, 37, 39, 45, 51, 53, 55, 61, 63, 65, 67, 69, 71, 73, 75, 83, 89, 91, 93, 95, 97, 99, 101, 103, 105, 107, 113, 115, 117, 123, 129, 137, 139, 141, 143, 145, 147, 149, 155, 157, 159, 161, 163, 165, 171, and 173 shown in Tables 1-16. The invention provides an isolated polypeptide, wherein said polypeptide comprises the amino acid sequence encoded by a polypeptide selected from the group consisting of SEQ ID NOS: 6, 12, 14, 20, 28, 30, 36, 38, 40, 46, 52, 54, 56, 62, 64, 66, 68, 70, 72, 74, 76, 84, 90, 92, 94, 96, 98, 100, 102, 104, 106, 108, 114, 116, 118, 124, 130, 138, 140, 142, 144, 146, 148, 150, 156, 158, 160, 162, 164, 166, 172, and 174 shown in Tables 1-16.

[0025] The invention further provides an isolated polypeptide, comprising the amino acid sequence of an epitope of the amino acid sequence of a CA polypeptide selected from the group consisting of SEQ ID NOS: 6, 12, 14, 20, 28, 30, 36, 38, 40, 46, 52, 54, 56, 62, 64, 66, 68, 70, 72, 74, 76, 84, 90, 92, 94, 96, 98, 100, 102, 104, 106, 108, 114, 116, 118, 124, 130, 138, 140, 142, 144, 146, 148, 150, 156, 158, 160, 162, 164, 166, 172, and 174 shown in Tables 1-16, wherein the polypeptide or fragment thereof may be attached to a solid support. In one embodiment the invention provides an isolated antibody (monoclonal or polyclonal) or antigen binding fragment thereof, that binds to such a polypeptide. The isolated antibody or antigen binding fragment thereof may be attached to a solid support, or further comprises a detectable label.

[0026] In one embodiment, the invention provides a kit for diagnosing the presence of cancer in a test sample, said kit comprising at least one polynucleotide that selectively hybridizes to a CA polynucleotide sequence shown in Tables 1-16, or its complement. In another embodiment the invention provides an electronic library comprising a CA polynucleotide, a CA polypeptide, or fragment thereof, shown in Tables 1-16.

[0027] In one embodiment, the invention provides a method of screening for anticancer activity comprising: (a) providing a cell that expresses a cancer associated (CA) gene encoded by a nucleic acid sequence selected from the group consisting of the CA sequences shown in Tables 1-16, or fragment thereof; (b) contacting a tissue sample derived from a cancer cell with an anticancer drug candidate; (c) monitoring an effect of the anticancer drug candidate on an expression of the CA polynucleotide in the tissue sample, and optionally (d) comparing the level of expression in the absence of said drug candidate to the level of expression in the presence of the drug candidate.

[0028] In one embodiment, the invention provides a method for detecting cancer associated with expression of a polypeptide in a test cell sample, comprising the steps of: (i) detecting a level of expression of at least one polypeptide selected from the group consisting of SEQ ID NOS: 6, 12, 14, 20, 28, 30, 36, 38, 40, 46, 52, 54, 56, 62, 64, 66, 68, 70, 72, 74, 76, 84, 90, 92, 94, 96, 98, 100, 102, 104, 106, 108, 114, 116, 118, 124, 130, 138, 140, 142, 144, 146, 148, 150, 156, 158, 160, 162, 164, 166, 172, and 174 shown in Tables 1-16, or a fragment thereof; and (ii) comparing the level of expression of the polypeptide in the test sample with a level of expression of polypeptide in a normal cell sample, wherein an altered level of expression of the polypeptide in the test cell sample relative to the level of polypeptide expression in the normal cell sample is indicative of the presence of cancer in the test cell sample.

[0029] In another embodiment, the invention provides a method for detecting cancer associated with expression of a polypeptide in a test cell sample, comprising the steps of: (i) detecting a level of activity of at least one polypeptide selected from the group consisting of SEQ ID NOS: 6, 12, 14, 20, 28, 30, 36, 38, 40, 46, 52, 54, 56, 62, 64, 66, 68, 70, 72, 74, 76, 84, 90, 92, 94, 96, 98, 100, 102, 104, 106, 108, 114, 116, 118, 124, 130, 138, 140, 142, 144, 146, 148, 150, 156, 158, 160, 162, 164, 166, 172, and 174 shown in Tables 1-16, or a fragment thereof, wherein said activity corresponds to at least one activity for the polypeptide listed in Table 18; and (ii) comparing the level of activity of the polypeptide in the test sample with a level of activity of polypeptide in a normal cell sample, wherein an altered level of activity of the polypeptide in the test cell sample relative to the level of polypeptide activity in the normal cell sample is indicative of the presence of cancer in the test cell sample.

[0030] In another embodiment, the invention provides a method for detecting cancer associated with the presence of an antibody in a test serum sample, comprising the steps of: (i) detecting a level of an antibody against an antigenic polypeptide selected from the group consisting of SEQ ID NOS: 6, 12, 14, 20, 28, 30, 36, 38, 40, 46, 52, 54, 56, 62, 64, 66, 68, 70, 72, 74, 76, 84, 90, 92, 94, 96, 98, 100, 102, 104, 106, 108, 114, 116, 118, 124, 130, 138, 140, 142, 144, 146, 148, 150, 156, 158, 160, 162, 164, 166, 172, and 174 shown in Tables 1-16, or antigenic fragment thereof; and (ii) comparing said level of said antibody in the test sample with a level of said antibody in the control sample, wherein an altered level of antibody in said test sample relative to the level of antibody in the control sample is indicative of the presence of cancer in the test serum sample.

[0031] The invention provides a method for screening for a bioactive agent capable of modulating the activity of a CA protein (CAP), wherein said CAP is encoded by a nucleic acid comprising a nucleic acid sequence selected from the group consisting of the polynucleotide sequences SEQ ID NOS: 5, 11, 13, 19, 27, 29, 35, 37, 39, 45, 51, 53, 55, 61, 63, 65, 67, 69, 71, 73, 75, 83, 89, 91, 93, 95, 97, 99, 101, 103, 105, 107, 113, 115, 117, 123, 129, 137, 139, 141, 143, 145, 147, 149, 155, 157, 159, 161, 163, 165, 171, and 173 shown in Tables 1-16, said method comprising: a) combining said CAP and a candidate bioactive agent; and b) determining the effect of the candidate agent on the bioactivity of said CAP. According to the method the bioactive agent: affects the expression of the CA protein (CAP); affects the activity of the CA protein (CAP), wherein such activity is selected from the activities listed in Table 18.

[0032] In one embodiment, the invention provides a method for diagnosing cancer comprising: a) determining the expression of one or more genes comprising a nucleic acid sequence selected from the group consisting of the human genomic and mRNA sequences outlined in Tables 1-16, in a first tissue type of a first individual; and b) comparing said expression of said gene(s) from a second normal tissue type from said first individual or a second unaffected individual; wherein a difference in said expression indicates that the first individual has cancer.

[0033] In another embodiment the invention provides a method for treating cancers comprising administering to a patient a bioactive agent modulating the activity of a CA protein (CAP), wherein said CAP is encoded by a nucleic acid comprising a nucleic acid sequence selected from the group consisting of the human nucleic acid sequences in Tables 1-16 and further wherein the bioactive agent binds to the CA protein, wherein the CA protein: is a signalling protein wherein the CAP sequence is selected from the group consisting of SEQ ID NOS: 6, 12, 14, 96, 130, 172 and 174 shown in Tables 1-16; is involved in signal transduction wherein the CAP sequence is selected from the group consisting of SEQ ID NOS: 20, 84, 90, 92, 94, 96, 98, 100, 102, 104, 106, and 108; is a cell adhesion protein wherein the CAP sequence is selected from the group consisting of SEQ ID NOS: 36, 38, 40, 84, 90, 92, 94, 96, 98, 100, 102, 104, 106, 108, 124, 172, and 174; is involved in inflammatory response wherein the CAP sequence is selected from the group consisting of SEQ ID NOS: 62, 64, 66, 68, 72, 74, and 76; is involved in pheromone response wherein the CAP sequence is selected from the group consisting of SEQ ID NOS: 138, 140, 142, 144, 146, 148, and 150; is an ion transport protein wherein the CAP sequence is selected from the group consisting of SEQ ID NOS: 28, 30, 114, and 118 as shown in Tables 1-16.

[0034] The invention provides monoclonal antibodies that preferentially binds to a CA protein (CAP) that is expressed on a cell surface, wherein the CA protein selected from the group consisting of SEQ ID NOS: 6, 12, 14, 20, 28, 30, 36, 38, 40, 46, 52, 54, 56, 62, 64, 66, 68, 70, 72, 74, 76, 84, 90, 92, 94, 96, 98, 100, 102, 104, 106, 108, 114, 116, 118, 124, 130, 138, 140, 142, 144, 146, 148, 150, 156, 158, 160, 162, 164, 166, 172, and 174; preferably to the extracellular domain of the CA protein; preferably to a CA protein differentially expressed on a cancer cell surface relative to a normal cell surface or preferably to at least one human cancer cell line; preferably linked to a therapeutic agent; or preferably humanized. Kits and pharmaceutical compositions for detecting a presence or an absence of cancer cells in an individual, and comprising such antibodies are also provided.

[0035] The invention also provides a method for detecting a presence or an absence of cancer cells in an individual, the method comprising: contacting cells from the individual with the antibody according to the invention; and detecting a complex of a CAP from the cancer cells and the antibody, wherein detection of the complex correlates with the presence of cancer cells in the individual. In one embodiment the invention provides a method for inhibiting growth of cancer cells in an individual, the method comprising: administering to the individual an effective amount of a pharmaceutical composition according to the invention. In another embodiment the invention provides a method for delivering a therapeutic agent to cancer cells in an individual, the method comprising: administering to the individual an effective amount of a pharmaceutical composition according to according to the invention.

[0036] Novel sequences associated with cancer are also provided herein. Other aspects of the invention will become apparent to the skilled artisan by the following description of the invention.

### BRIEF DESCRIPTION OF THE FIGURES

[0037] FIG. 1 depicts PCR amplification of host-provirus junction fragments.

[0038] FIG. 2 shows an example of average threshold cycle (C_{T}) values for a housekeeper gene and target gene.

[0039] FIG. 3 shows an example of the calculated difference (ΔΔC_{T}) between the C_{T} values of target and housekeeper genes (ΔC_{T}) for various samples.

[0040] FIG. 4 shows the ΔΔC_{T} and comparative expression level for each sample from FIG. 3.

### DETAILED DESCRIPTION OF PREFERRED EMBODIMENTS

[0041] The present invention is directed to a number of sequences associated with cancers, especially lymphoma, breast cancer or prostate cancer. The relatively tight linkage between clonally-integrated proviruses and protooncogenes forms “provirus tagging”, in which slow-transforming retroviruses that act by an insertion mutation mechanism are used to isolate protooncogenes. In some models, uninfected animals have low cancer rates, and infected animals have high cancer rates. It is known that many of the retroviruses involved do not carry transduced host protooncogenes or pathogenic trans-acting viral genes, and thus the cancer incidence must therefore be a direct consequence of proviral integration effects into host protooncogenes. Since proviral integration is random, rare integrants will “activate” host protooncogenes that provide a selective growth advantage, and these rare events result in new proviruses at clonal stoichiometries in tumors. In contrast to mutations caused by chemicals, radiation, or spontaneous errors, protooncogene insertion mutations can be easily located by virtue of the fact that a convenient-sized genetic marker of known sequence (the provirus) is present at the site of mutation. Host sequences that flank clonally integrated proviruses can be cloned using a variety of strategies. Once these sequences are in hand, the tagged protooncogenes can be subsequently identified. The presence of provirus at the same locus in two or more independent tumors is prima facie evidence that a protooncogene is present at or very near the provirus integration sites. This is because the genome is too large for random integrations to result in observable clustering. Any clustering that is detected is unequivocal evidence for biological selection (i.e. the tumor phenotype). Moreover, the pattern of proviral integrants (including orientations) provides compelling positional information that makes localization of the target gene at each cluster relatively simple. The three mammalian retroviruses that are known to cause cancer by an insertion mutation mechanism are FeLV (leukemia/lymphoma in cats), MLV (leukemia/lymphoma in mice and rats), and MMTV (mammary cancer in mice).

[0042] Thus, the use of oncogenic retroviruses, whose sequences insert into the genome of the host organism resulting in cancer, allows the identification of host sequences involved in cancer. These sequences may then be used in a number of different ways, including diagnosis, prognosis, screening for modulators (including both agonists and antagonists), antibody generation (for immunotherapy and imaging), etc. However, as will be appreciated by those in the art, oncogenes that are identified in one type of cancer such as lymphoma or leukemia have a strong likelihood of being involved in other types of cancers as well. Thus, while the sequences outlined herein are initially identified as correlated with lymphoma, they can also be found in other types of cancers as well, outlined below.

### DEFINITIONS

[0043] Accordingly, the present invention provides nucleic acid and protein sequences that are associated with cancer, herein termed “cancer associated” or “CA” sequences. In one embodiment, the present invention provides nucleic acid and protein sequences that are associated with cancers that originate in lymphatic tissue, herein termed “lymphoma associated,” “leukemia associated” or “LA” sequences. In another embodiment, the present invention provides nucleic acid and protein sequences that are associated with carcinomas which originate in breast tissue, herein termed “breast cancer associated” or “BC” sequences.

[0044] Suitable cancers that can be diagnosed or screened for using the methods of the present invention include cancers classified by site or by histological type. Cancers classified by site include cancer of the oral cavity and pharynx (lip, tongue, salivary gland, floor of mouth, gum and other mouth, nasopharynx, tonsil, oropharynx, hypopharynx, other oral/pharynx); cancers of the digestive system (esophagus; stomach; small intestine; colon and rectum; anus, anal canal, and anorectum; liver; intrahepatic bile duct; gallbladder; other biliary; pancreas; retroperitoneum; peritoneum, omentum, and mesentery; other digestive); cancers of the respiratory system (nasal cavity, middle ear, and sinuses; larynx; lung and bronchus; pleura; trachea, mediastinum, and other respiratory); cancers of the mesothelioma; bones and joints; and soft tissue, including heart; skin cancers, including melanomas and other non-epithelial skin cancers; Kaposi's sarcoma and breast cancer; cancer of the female genital system (cervix uteri; corpus uteri; uterus, nos; ovary; vagina; vulva; and other female genital); cancers of the male genital system (prostate gland; testis; penis; and other male genital); cancers of the urinary system (urinary bladder; kidney and renal pelvis; ureter; and other urinary); cancers of the eye and orbit; cancers of the brain and nervous system (brain; and other nervous system); cancers of the endocrine system (thyroid gland and other endocrine, including thymus); lymphomas (Hodgkin's disease and non-Hodgkin's lymphoma), multiple myelonia, and leukemias (lymphocytic leukemia; myeloid leukemia; monocytic leukemia; and other leukemias).

[0045] Other cancers, classified by histological type, that may be associated with the sequences of the invention include, but are not limited to, Neoplasm, malignant; Carcinoma, NOS; Carcinoma, undifferentiated, NOS; Giant and spindle cell carcinoma; Small cell carcinoma, NOS; Papillary carcinoma, NOS; Squamous cell carcinoma, NOS; Lymphoepithelial carcinoma; Basal cell carcinoma, NOS; Pilomatrix carcinoma; Transitional cell carcinoma, NOS; Papillary transitional cell carcinoma; Adenocarcinoma, NOS; Gastrinoma, malignant; Cholangiocarcinoma; Hepatocellular carcinoma, NOS; Combined hepatocellular carcinoma and cholangiocarcinoma; Trabecular adenocarcinoma; Adenoid cystic carcinoma; Adenocarcinoma in adenomatous polyp; Adenocarcinoma, familial polyposis coli; Solid carcinoma, NOS; Carcinoid tumor, malignant; Bronchiolo-alveolar adenocarcinoma; Papillary adenocarcinoma, NOS; Chromophobe carcinoma; Acidophil carcinoma; Oxyphilic adenocarcinoma; Basophil carcinoma; Clear cell adenocarcinoma, NOS; Granular cell carcinoma; Follicular adenocarcinoma, NOS; Papillary and follicular adenocarcinoma; Nonencapsulating sclerosing carcinoma; Adrenal cortical carcinoma; Endometroid carcinoma; Skin appendage carcinoma; Apocrine adenocarcinoma; Sebaceous adenocarcinoma; Ceruminous adenocarcinoma; Mucoepidermoid carcinoma; Cystadenocarcinoma, NOS; Papillary cystadenocarcinoma, NOS; Papillary serous cystadenocarcinoma; Mucinous cystadenocarcinoma, NOS; Mucinous adenocarcinoma; Signet ring cell carcinoma; Infiltrating duct carcinoma; Medullary carcinoma, NOS; Lobular carcinoma; Inflammatory carcinoma; Paget's disease, mammary; Acinar cell carcinoma; Adenosquamous carcinoma; Adenocarcinoma w/ squamous metaplasia; Thymoma, malignant; Ovarian stromal tumor, malignant; Thecoma, malignant; Granulosa cell tumor, malignant; Androblastoma, malignant; Sertoli cell carcinoma; Leydig cell tumor, malignant; Lipid cell tumor, malignant; Paraganglioma, malignant; Extra-mammary paraganglioma, malignant; Pheochromocytoma; Glomangiosarcoma; Malignant melanoma, NOS; Amelanotic melanoma; Superficial spreading melanoma; Malig melanoma in giant pigmented nevus; Epithelioid cell melanoma; Blue nevus, malignant; Sarcoma, NOS; Fibrosarcoma, NOS; Fibrous histiocytoma, malignant; Myxosarcoma; Liposarcoma, NOS; Leiomyosarcoma, NOS; Rhabdomyosarcoma, NOS; Embryonal rhabdomyosarcoma; Alveolar rhabdomyosarcoma; Stromal sarcoma, NOS; Mixed tumor, malignant, NOS; Mullerian mixed tumor; Nephroblastoma; Hepatoblastoma; Carcinosarcoma, NOS; Mesenchymoma, malignant; Brenner tumor, malignant; Phyllodes tumor, malignant; Synovial sarcoma, NOS; Mesothelioma, malignant; Dysgerminoma; Embryonal carcinoma, NOS; Teratoma, malignant, NOS; Struma ovarii, malignant; Choriocarcinoma; Mesonephroma, malignant; Hemangiosarcoma; Hemangioendothelioma, malignant; Kaposi's sarcoma; Hemangiopericytoma, malignant; Lymphangiosarcoma; Osteosarcoma, NOS; Juxtacortical osteosarcoma; Chondrosarcoma, NOS; Chondroblastoma, malignant; Mesenchymal chondrosarcoma; Giant cell tumor of bone; Ewing's sarcoma; Odontogenic tumor, malignant; Ameloblastic odontosarcoma; Ameloblastoma, malignant; Ameloblastic fibrosarcoma; Pinealoma, malignant; Chordoma; Glioma, malignant; Ependymoma, NOS; Astrocytoma, NOS; Protoplasmic astrocytoma; Fibrillary astrocytoma; Astroblastoma; Glioblastoma, NOS; Oligodendroglioma, NOS; Oligodendroblastoma; Primitive neuroectodermal; Cerebellar sarcoma, NOS; Ganglioneuroblastoma; Neuroblastoma, NOS; Retinoblastoma, NOS; Olfactory neurogenic tumor; Meningioma, malignant; Neurofibrosarcoma; Neurilemmoma, malignant; Granular cell tumor, malignant; Malignant lymphoma, NOS; Hodgkin's disease, NOS; Hodgkin's; paragranuloma, NOS; Malignant lymphoma, small lymphocytic; Malignant lymphoma, large cell, diffuse; Malignant lymphoma, follicular, NOS; Mycosis fungoides; Other specified non-Hodgkin's lymphomas; Malignant histiocytosis; Multiple myeloma; Mast cell sarcoma; Immunoproliferative small intestinal disease; Leukemia, NOS; Lymphoid leukemia, NOS; Plasma cell leukemia; Erythroleukemia; Lymphosarcoma cell leukemia; Myeloid leukemia, NOS; Basophilic leukemia; Eosinophilic leukemia; Monocytic leukemia, NOS; Mast cell leukemia; Megakaryoblastic leukemia; Myeloid sarcoma; and Hairy cell leukemia.

[0046] In addition, the CA genes may be involved in other diseases such as, but not limited to, diseases associated with aging or neurodegeneration.

[0047] “Association” in this context means that the nucleotide or protein sequences are either differentially expressed, activated, inactivated or altered in cancers as compared to normal tissue. As outlined below, CA sequences include those that are up-regulated (i.e. expressed at a higher level), as well as those that are down-regulated (i.e. expressed at a lower level), in cancers. CA sequences also include sequences that have been altered (i.e., truncated sequences or sequences with substitutions, deletions or insertions, including point mutations) and show either the same expression profile or an altered profile. In a preferred embodiment, the CA sequences are from humans; however, as will be appreciated by those in the art, CA sequences from other organisms may be useful in animal models of disease and drug evaluation; thus, other CA sequences are provided, from vertebrates, including mammals, including rodents (rats, mice, hamsters, guinea pigs, etc.), primates, and farm animals (including sheep, goats, pigs, cows, horses, etc). In some cases, prokaryotic CA sequences may be useful. CA sequences from other organisms may be obtained using the techniques outlined below.

[0048] CA sequences include both nucleic acid and amino acid sequences. In a preferred embodiment, the CA sequences are recombinant nucleic acids. By the term “recombinant nucleic acid” herein is meant nucleic acid, originally formed in vitro, in general, by the manipulation of nucleic acid by polymerases and endonucleases, in a form not normally found in nature. Thus a recombinant nucleic acid is also an isolated nucleic acid, in a linear form, or cloned in a vector formed in vitro by ligating DNA molecules that are not normally joined, are both considered recombinant for the purposes of this invention. It is understood that once a recombinant nucleic acid is made and reintroduced into a host cell or organism, it will replicate using the in vivo cellular machinery of the host cell rather than in vitro manipulations; however, such nucleic acids, once produced recombinantly, although subsequently replicated in vivo, are still considered recombinant or isolated for the purposes of the invention. As used herein a “polynucleotide” or “nucleic acid” is a polymeric form of nucleotides of any length, either ribonucleotides or deoxyribonucleotides. This term refers only to the primary structure of the molecule. Thus, this term includes double- and single-stranded DNA and RNA. It also includes known types of modifications, for example, labels which are known in the art, methylation, “caps”, substitution of one or more of the naturally occurring nucleotides with an analog, internucleotide modifications such as, for example, those with uncharged linkages (e.g., phosphorothioates, phosphorodithioates, etc.), those containing pendant moieties, such as, for example proteins (including e.g., nucleases, toxins, antibodies, signal peptides, poly-L-lysine, etc.), those with intercalators (e.g., acridine, psoralen, etc.), those containing chelators (e.g., metals, radioactive metals, etc.), those containing alkylators, those with modified linkages (e.g., alpha anomeric nucleic acids, etc.), as well as unmodified forms of the polynucleotide.

[0049] As used herein, a polynucleotide “derived from” a designated sequence refers to a polynucleotide sequence which is comprised of a sequence of approximately at least about 6 nucleotides, preferably at least about 8 nucleotides, more preferably at least about 10-12 nucleotides, and even more preferably at least about 15-20 nucleotides corresponding to a region of the designated nucleotide sequence. “Corresponding” means homologous to or complementary to the designated sequence. Preferably, the sequence of the region from which the polynucleotide is derived is homologous to or complementary to a sequence that is unique to a CA gene.

[0050] Similarly, a “recombinant protein” is a protein made using recombinant techniques, i.e. through the expression of a recombinant nucleic acid as depicted above. A recombinant protein is distinguished from naturally occurring protein by at least one or more characteristics. For example, the protein may be isolated or purified away from some or all of the proteins and compounds with which it is normally associated in its wild type host, and thus may be substantially pure. For example, an isolated protein is unaccompanied by at least some of the material with which it is normally associated in its natural state, preferably constituting at least about 0.5%, more preferably at least about 5% by weight of the total protein in a given sample. A substantially pure protein comprises about 50-75% by weight of the total protein, with about 80% being preferred, and about 90% being particularly preferred. The definition includes the production of a CA protein from one organism in a different organism or host cell. Alternatively, the protein may be made at a significantly higher concentration than is normally seen, through the use of an inducible promoter or high expression promoter, such that the protein is made at increased concentration levels. Alternatively, the protein may be in a form not normally found in nature, as in the addition of an epitope tag or amino acid substitutions, insertions and deletions, as discussed below.

[0051] In a preferred embodiment, the CA sequences are nucleic acids. As will be appreciated by those in the art and is more fully outlined below, CA sequences are useful in a variety of applications, including diagnostic applications, which will detect naturally occurring nucleic acids, as well as screening applications; for example, biochips comprising nucleic acid probes to the CA sequences can be generated. In the broadest sense, use of “nucleic acid,” “polynucleotide” or “oligonucleotide” or equivalents herein means at least two nucleotides covalently linked together. In some embodiments, an oligonucleotide is an oligomer of 6, 8, 10, 12, 20, 30 or up to 100 nucleotides. A “polynucleotide” or “oligonucleotide” may comprise DNA, RNA, PNA or a polymer of nucleotides linked by phosphodiester and/or any alternate bonds.

[0052] A nucleic acid of the present invention generally contains phosphodiester bonds, although in some cases, as outlined below (for example, in antisense applications or when a nucleic acid is a candidate drug agent), nucleic acid analogs may have alternate backbones, comprising, for example, phosphoramidate (Beaucage et al., Tetrahedron 49(10):1925 (1993) and references therein; Letsinger, J. Org. Chem. 35:3800 (1970); Sprinzl et al., Eur. J. Biochem. 81:579 (1977); Letsinger et al., Nucl. Acids Res. 14:3487 (1986); Sawai et al, Chem. Lett. 805 (1984), Letsinger et al., J. Am. Chem. Soc. 110:4470 (1988); and Pauwels et al., Chemica Scripta 26:141 91986)), phosphorothioate (Mag et al., Nucleic Acids Res. 19:1437 (1991); and U.S. Pat. No. 5,644,048), phosphorodithioate (Briu et al., J. Am. Chem. Soc. 111:2321 (1989), O-methylphosphoroamidite linkages (see Eckstein, Oligonucleotides and Analogues: A Practical Approach, Oxford University Press), and peptide nucleic acid backbones and linkages (see Egholm, J. Am. Chem. Soc. 114:1895 (1992); Meier et al., Chem. Int. Ed. Engl. 31:1008 (1992); Nielsen, Nature, 365:566 (1993); Carlsson et al., Nature 380:207 (1996), all of which are incorporated by reference). Other analog nucleic acids include those with positive backbones (Denpcy et al., Proc. Natl. Acad. Sci. USA 92:6097 (1995); non-ionic backbones (U.S. Pat. Nos. 5,386,023, 5,637,684, 5,602,240, 5,216,141 and 4,469,863; Kiedrowshi et al., Angew. Chem. Intl. Ed. English 30:423 (1991); Letsinger et al., J. Am. Chem. Soc. 110:4470 (1988); Letsinger et al., Nucleoside & Nucleotide 13:1597 (1994); Chapters 2 and 3, ASC Symposium Series 580, “Carbohydrate Modifications in Antisense Research”, Ed. Y. S. Sanghui and P. Dan Cook; Mesmaeker et al., Bioorganic & Medicinal Chem. Lett. 4:395 (1994); Jeffs et al., J. Biomolecular NMR 34:17 (1994); Tetrahedron Lett. 37:743 (1996)) and non-ribose backbones, including those described in U.S. Pat. Nos. 5,235,033 and 5,034,506, and Chapters 6 and 7, ASC Symposium Series 580, “Carbohydrate Modifications in Antisense Research”, Ed. Y. S. Sanghui and P. Dan Cook. Nucleic acids containing one or more carbocyclic sugars are also included within one definition of nucleic acids (see Jenkins et al., Chem. Soc. Rev. (1995) pp 169-176). Several nucleic acid analogs are described in Rawls, C & E News Jun. 2, 1997 page 35. All of these references are hereby expressly incorporated by reference. These modifications of the ribose-phosphate backbone may be done for a variety of reasons, for example to increase the stability and half-life of such molecules in physiological environments for use in anti-sense applications or as probes on a biochip.

[0053] As will be appreciated by those in the art, all of these nucleic acid analogs may find use in the present invention. In addition, mixtures of naturally occurring nucleic acids and analogs can be made; alternatively, mixtures of different nucleic acid analogs, and mixtures of naturally occurring nucleic acids and analogs may be made.

[0054] The nucleic acids may be single stranded or double stranded, as specified, or contain portions of both double stranded or single stranded sequence. As will be appreciated by those in the art, the depiction of a single strand “Watson” also defines the sequence of the other strand “Crick”; thus the sequences described herein also includes the complement of the sequence. The nucleic acid may be DNA, both genomic and cDNA, RNA, or a hybrid, where the nucleic acid contains any combination of deoxyribo- and ribo-nucleotides, and any combination of bases, including uracil, adenine, thymine, cytosine, guanine, inosine, xanthine, hypoxanthine, isocytosine, isoguanine, etc. As used herein, the term “nucleoside” includes nucleotides and nucleoside and nucleotide analogs, and modified nucleosides such as amino modified nucleosides. In addition, “nucleoside” includes non-naturally occurring analog structures. Thus for example the individual units of a peptide nucleic acid, each containing a base, are referred to herein as a nucleoside.

[0055] As used herein, the term “tag,” “sequence tag” or “primer tag sequence” refers to an oligonucleotide with specific nucleic acid sequence that serves to identify a batch of polynucleotides bearing such tags therein. Polynucleotides from the same biological source are covalently tagged with a specific sequence tag so that in subsequent analysis the polynucleotide can be identified according to its source of origin. The sequence tags also serve as primers for nucleic acid amplification reactions.

[0056] A “microarray” is a linear or two-dimensional array of preferably discrete regions, each having a defined area, formed on the surface of a solid support. The density of the discrete regions on a microarray is determined by the total numbers of target polynucleotides to be detected on the surface of a single solid phase support, preferably at least about 50/cm², more preferably at least about 100/cm², even more preferably at least about 500/cm², and still more preferably at least about 1,000/cm². As used herein, a DNA microarray is an array of oligonucleotide primers placed on a chip or other surfaces used to amplify or clone target polynucleotides. Since the position of each particular group of primers in the array is known, the identities of the target polynucleotides can be determined based on their binding to a particular position in the microarray.

[0057] A “linker” is a synthetic oligodeoxyribonucleotide that contains a restriction site. A linker may be blunt end-ligated onto the ends of DNA fragments to create restriction sites that can be used in the subsequent cloning of the fragment into a vector molecule.

[0058] The term “label” refers to a composition capable of producing a detectable signal indicative of the presence of the target polynucleotide in an assay sample. Suitable labels include radioisotopes, nucleotide chromophores, enzymes, substrates, fluorescent molecules, chemiluminescent moieties, magnetic particles, bioluminescent moieties, and the like. As such, a label is any composition detectable by spectroscopic, photochemical, biochemical, immunochemical, electrical, optical, chemical, or any other appropriate means. The term “label” is used to refer to any chemical group or moiety having a detectable physical property or any compound capable of causing a chemical group or moiety to exhibit a detectable physical property, such as an enzyme that catalyzes conversion of a substrate into a detectable product. The term “label” also encompasses compounds that inhibit the expression of a particular physical property. The label may also be a compound that is a member of a binding pair, the other member of which bears a detectable physical property.

[0059] The term “support” refers to conventional supports such as beads, particles, dipsticks, fibers, filters, membranes, and silane or silicate supports such as glass slides.

[0060] The term “amplify” is used in the broad sense to mean creating an amplification product which may include, for example, additional target molecules, or target-like molecules or molecules complementary to the target molecule, which molecules are created by virtue of the presence of the target molecule in the sample. In the situation where the target is a nucleic acid, an amplification product can be made enzymatically with DNA or RNA polymerases or reverse transcriptases.

[0061] As used herein, a “biological sample” refers to a sample of tissue or fluid isolated from an individual, including but not limited to, for example, blood, plasma, serum, spinal fluid, lymph fluid, skin, respiratory, intestinal and genitourinary tracts, tears, saliva, milk, cells (including but not limited to blood cells), tumors, organs, and also samples of in vitro cell culture constituents.

[0062] The term “biological sources” as used herein refers to the sources from which the target polynucleotides are derived. The source can be of any form of “sample” as described above, including but not limited to, cell, tissue or fluid. “Different biological sources” can refer to different cells/tissues/organs of the same individual, or cells/tissues/organs from different individuals of the same species, or cells/tissues/organs from different species.

### Cancer-Associated Sequences

[0063] The CA sequences of the invention were initially identified by infection of mice with a retrovirus such as murine leukemia virus (MLV) resulting in lymphoma. Retroviruses have a genome that is made out of RNA. After a retrovirus infects a host cell, a double stranded DNA copy of the retrovirus genome (a “provirus”) is inserted into the genomic DNA of the host cell. The integrated provirus may affect the expression of host genes at or near the site of integration—a phenomenon known as retroviral insertional mutagenesis. Possible changes in the expression of host cell genes include: (i) increased expression of genes near the site of integration resulting from the proximity of elements in the provirus that act as transcriptional promoters and enhancers, (ii) functional inactivation of a gene caused by the integration of a provirus into the gene itself thus preventing the synthesis of a functional gene product, or (iii) expression of a mutated protein that has a different activity to the normal protein. Typically such a protein would be prematurely truncated and lack a regulatory domain near the C terminus. Such a protein might be constitutively active, or act as a dominant negative inhibitor of the normal protein. For example, retrovirus enhancers, including that of SL3-3, are known to act on genes up to approximately 200 kilobases from the insertion site. Moreover, many of these sequences are also involved in other cancers and disease states. Sequences of mouse genes according to this invention, that are identified in this manner are shown as mDxx-yyy in Tables 1-16.

[0064] A CA sequence can be initially identified by substantial nucleic acid and/or amino acid sequence homology to the CA sequences outlined herein. Such homology can be based upon the overall nucleic acid or amino acid sequence, and is generally determined as outlined below, using either homology programs or hybridization conditions.

[0065] In one embodiment, CA sequences are those that are up-regulated in cancers; that is, the expression of these genes is higher in cancer tissue as compared to normal tissue of the same differentiation stage. “Up-regulation” as used herein means increased expression by about 50%, preferably about 100%, more preferably about 150% to about 200%, with up-regulation from 300% to 1000% being preferred.

[0066] In another embodiment, CA sequences are those that are down-regulated in cancers; that is, the expression of these genes is lower in cancer tissue as compared to normal tissue of the same differentiation stage. “Down-regulation” as used herein means decreased expression by about 50%, preferably about 100%, more preferably about 150% to about 200%, with down-regulation from 300% to 1000% to no expression being preferred.

[0067] In yet another embodiment, CA sequences are those that have altered sequences but show either the same or an altered expression profile as compared to normal lymphoid tissue of the same differentiation stage. “Altered CA sequences” as used herein also refers to sequences that are truncated, contain insertions or contain point mutations.

[0068] CA proteins of the present invention may be classified as secreted proteins, transmembrane proteins or intracellular proteins. In a preferred embodiment the CA protein is an intracellular protein. Intracellular proteins may be found in the cytoplasm and/or in the nucleus. Intracellular proteins are involved in all aspects of cellular function and replication (including, for example, signaling pathways); aberrant expression of such proteins results in unregulated or disregulated cellular processes. For example, many intracellular proteins have enzymatic activity such as protein kinase activity, protein phosphatase activity, protease activity, nucleotide cyclase activity, polymerase activity and the like. Intracellular proteins also serve as docking proteins that are involved in organizing complexes of proteins, or targeting proteins to various subcellular localizations, and are involved in maintaining the structural integrity of organelles.

[0069] An increasingly appreciated concept in characterizing intracellular proteins is the presence in the proteins of one or more motifs for which defined functions have been attributed. In addition to the highly conserved sequences found in the enzymatic domain of proteins, highly conserved sequences have been identified in proteins that are involved in protein-protein interaction. For example, Src-homology-2 (SH2) domains bind tyrosine-phosphorylated targets in a sequence dependent manner. PTB domains, which are distinct from SH2 domains, also bind tyrosine phosphorylated targets. SH3 domains bind to proline-rich targets. In addition, PH domains, tetratricopeptide repeats and WD domains to name only a few, have been shown to mediate protein-protein interactions. Some of these may also be involved in binding to phospholipids or other second messengers. As will be appreciated by one of ordinary skill in the art, these motifs can be identified on the basis of primary sequence; thus, an analysis of the sequence of proteins may provide insight into both the enzymatic potential of the molecule and/or molecules with which the protein may associate.

[0070] In a preferred embodiment, the CA sequences are transmembrane proteins. Transmembrane proteins are molecules that span the phospholipid bilayer of a cell. They may have an intracellular domain, an extracellular domain, or both. The intracellular domains of such proteins may have a number of functions including those already described for intracellular proteins. For example, the intracellular domain may have enzymatic activity and/or may serve as a binding site for additional proteins. Frequently the intracellular domain of transmembrane proteins serves both roles. For example certain receptor tyrosine kinases have both protein kinase activity and SH2 domains. In addition, autophosphorylation of tyrosines on the receptor molecule itself creates binding sites for additional SH2 domain containing proteins.

[0071] Transmembrane proteins may contain from one to many transmembrane domains. For example, receptor tyrosine kinases, certain cytokine receptors, receptor guanylyl cyclases and receptor serine/threonine protein kinases contain a single transmembrane domain. However, various other proteins including channels and adenylyl cyclases contain numerous transmembrane domains. Many important cell surface receptors are classified as “seven transmembrane domain” proteins, as they contain 7 membrane spanning regions. Important transmembrane protein receptors include, but are not limited to insulin receptor, insulin-like growth factor receptor, human growth hormone receptor, glucose transporters, transferrin receptor, epidermal growth factor receptor, low density lipoprotein receptor, leptin receptor, interleukin receptors, e.g. IL-1 receptor, IL-2 receptor, etc. CA proteins may be derived from genes that regulate apoptosis (IL-3, GM-CSF and Bcl-x) or are shown to have a role in the regulation of apoptosis.

[0072] Characteristics of transmembrane domains include approximately 20 consecutive hydrophobic amino acids that may be followed by charged amino acids. Therefore, upon analysis of the amino acid sequence of a particular protein, the localization and number of transmembrane domains within the protein may be predicted.

[0073] The extracellular domains of transmembrane proteins are diverse; however, conserved motifs are found repeatedly among various extracellular domains. Conserved structure and/or functions have been ascribed to different extracellular motifs. For example, cytokine receptors are characterized by a cluster of cysteines and a WSXWS (W=tryptophan, S=serine, X=any amino acid) motif. Immunoglobulin-like domains are highly conserved. Mucin-like domains may be involved in cell adhesion and leucine-rich repeats participate in protein-protein interactions.

[0074] Many extracellular domains are involved in binding to other molecules. In one aspect, extracellular domains are receptors. Factors that bind the receptor domain include circulating ligands, which may be peptides, proteins, or small molecules such as adenosine and the like. For example, growth factors such as EGF, FGF and PDGF are circulating growth factors that bind to their cognate receptors to initiate a variety of cellular responses. Other factors include cytokines, mitogenic factors, neurotrophic factors and the like. Extracellular domains also bind to cell-associated molecules. In this respect, they mediate cell-cell interactions. Cell-associated ligands can be tethered to the cell for example via a glycosylphosphatidylinositol (GPI) anchor, or may themselves be transmembrane proteins. Extracellular domains also associate with the extracellular matrix and contribute to the maintenance of the cell structure.

[0075] CA proteins that are transmembrane are particularly preferred in the present invention as they are good targets for immunotherapeutics, as are described herein. In addition, as outlined below, transmembrane proteins can be also useful in imaging modalities.

[0076] It will also be appreciated by those in the art that a transmembrane protein can be made soluble by removing transmembrane sequences, for example through recombinant methods. Furthermore, transmembrane proteins that have been made soluble can be made to be secreted through recombinant means by adding an appropriate signal sequence.

[0077] In a preferred embodiment, the CA proteins are secreted proteins; the secretion of which can be either constitutive or regulated. These proteins have a signal peptide or signal sequence that targets the molecule to the secretory pathway. Secreted proteins are involved in numerous physiological events; by virtue of their circulating nature, they serve to transmit signals to various other cell types. The secreted protein may function in an autocrine manner (acting on the cell that secreted the factor), a paracrine manner (acting on cells in close proximity to the cell that secreted the factor) or an endocrine manner (acting on cells at a distance). Thus secreted molecules find use in modulating or altering numerous aspects of physiology. CA proteins that are secreted proteins are particularly preferred in the present invention as they serve as good targets for diagnostic markers, for example for blood tests.

### CA Sequences and Homologs

[0078] A CA sequence is initially identified by substantial nucleic acid and/or amino acid sequence homology to the CA sequences outlined herein. Such homology can be based upon the overall nucleic acid or amino acid sequence, and is generally determined as outlined below, using either homology programs or hybridization conditions.

[0079] As used herein, a nucleic acid is a “CA nucleic acid” if the overall homology of the nucleic acid sequence to one of the nucleic acids of Tables 1-16 is preferably greater than about 75%, more preferably greater than about 80%, even more preferably greater than about 85% and most preferably greater than 90%. In some embodiments the homology will be as high as about 93 to 95 or 98%. In a preferred embodiment, the sequences that are used to determine sequence identity or similarity are selected from those of the nucleic acids of Tables 1-16. In another embodiment, the sequences are naturally occurring allelic variants of the sequences of the nucleic acids of Tables 1-16. In another embodiment, the sequences are sequence variants as further described herein.

[0080] Homology in this context means sequence similarity or identity, with identity being preferred. A preferred comparison for homology purposes is to compare the sequence containing sequencing errors to the correct sequence. This homology will be determined using standard techniques known in the art, including, but not limited to, the local homology algorithm of Smith & Waterman, Adv. Appl. Math. 2:482 (1981), by the homology alignment algorithm of Needleman & Wunsch, J. Mol. Biol. 48:443 (1970), by the search for similarity method of Pearson & Lipman, PNAS USA 85:2444 (1988), by computerized implementations of these algorithms (GAP, BESTFIT, FASTA, and TFASTA in the Wisconsin Genetics Software Package, Genetics Computer Group, 575 Science Drive, Madison, Wis.), the Best Fit sequence program described by Devereux et al., Nucl. Acid Res. 12:387-395 (1984), preferably using the default settings, or by inspection.

[0081] One example of a useful algorithm is PILEUP. PILEUP creates a multiple sequence alignment from a group of related sequences using progressive, pairwise alignments. It can also plot a tree showing the clustering relationships used to create the alignment. PILEUP uses a simplification of the progressive alignment method of Feng & Doolittle, J. Mol. Evol. 35:351-360 (1987); the method is similar to that described by Higgins & Sharp CABIOS 5:151-153 (1989). Useful PILEUP parameters include a default gap weight of 3.00, a default gap length weight of 0.10, and weighted end gaps.

[0082] Another example of a useful algorithm is the BLAST (Basic Local Alignment Search Tool) algorithm, described in Altschul et al., J. Mol. Biol. 215, 403-410, (1990) and Karlin et al., PNAS USA 90:5873-5787 (1993). A particularly useful BLAST program is the WU-BLAST-2 program which was obtained from Altschul et al., Methods in Enzymology, 266: 460-480 (1996); http://blast.wustl.edu/]. WU-BLAST-2 uses several search parameters, most of which are set to the default values. The adjustable parameters are set with the following values: overlap span=1, overlap fraction=0.125, word threshold (T)=11. The HSP S and HSP S2 parameters are dynamic values and are established by the program itself depending upon the composition of the particular sequence and composition of the particular database against which the sequence of interest is being searched; however, the values may be adjusted to increase sensitivity. A percent amino acid sequence identity value is determined by the number of matching identical residues divided by the total number of residues of the “longer” sequence in the aligned region. The “longer” sequence is the one having the most actual residues in the aligned region (gaps introduced by WU-Blast-2 to maximize the alignment score are ignored).

[0083] Thus, “percent (%) nucleic acid sequence identity” is defined as the percentage of nucleotide residues in a candidate sequence that are identical with the nucleotide residues of the nucleic acids of Tables 1-16. A preferred method utilizes the BLASTN module of WU-BLAST-2 set to the default parameters, with overlap span and overlap fraction set to 1 and 0.125, respectively.

[0084] The alignment may include the introduction of gaps in the sequences to be aligned. In addition, for sequences which contain either more or fewer nucleotides than those of the nucleic acids of Tables 1-16, it is understood that the percentage of homology will be determined based on the number of homologous nucleosides in relation to the total number of nucleosides. Thus homology of sequences shorter than those of the sequences identified herein will be determined using the number of nucleosides in the shorter sequence.

[0085] In another embodiment of the invention, polynucleotide compositions are provided that are capable of hybridizing under moderate to high stringency conditions to a polynucleotide sequence provided herein, or a fragment thereof, or a complementary sequence thereof. Hybridization techniques are well known in the art of molecular biology. For purposes of illustration, suitable moderately stringent conditions for testing the hybridization of a polynucleotide of this invention with other polynucleotides include prewashing in a solution of 5×SSC (“saline sodium citrate”; 9 mM NaCl, 0.9 mM sodium citrate), 0.5% SDS, 1.0 mM EDTA (pH 8.0); hybridizing at 50-60° C., 5×SSC, overnight; followed by washing twice at 65° C. for 20 minutes with each of 2×, 0.5× and 0.2×SSC containing 0.1% SDS. One skilled in the art will understand that the stringency of hybridization can be readily manipulated, such as by altering the salt content of the hybridization solution and/or the temperature at which the hybridization is performed. For example, in another embodiment, suitable highly stringent hybridization conditions include those described above, with the exception that the temperature of hybridization is increased, e.g., to 60-65° C., or 65-70° C. Stringent conditions may also be achieved with the addition of destabilizing agents such as formamide.

[0086] Thus nucleic acids that hybridize under high stringency to the nucleic acids identified in the figures, or their complements, are considered CA sequences. High stringency conditions are known in the art; see for example Maniatis et al., Molecular Cloning: A Laboratory Manual, 2d Edition, 1989, and Short Protocols in Molecular Biology, ed. Ausubel, et al., both of which are hereby incorporated by reference. Stringent conditions are sequence-dependent and will be different in different circumstances. Longer sequences hybridize specifically at higher temperatures. An extensive guide to the hybridization of nucleic acids is found in Tijssen, Techniques in Biochemistry and Molecular Biology—Hybridization with Nucleic Acid Probes, “Overview of principles of hybridization and the strategy of nucleic acid assays” (1993). Generally, stringent conditions are selected to be about 5-10° C. lower than the thermal melting point (Tₘ) for the specific sequence at a defined ionic strength pH. The Tₘ is the temperature (under defined ionic strength, pH and nucleic acid concentration) at which 50% of the probes complementary to the target hybridize to the target sequence at equilibrium (as the target sequences are present in excess, at Tₘ, 50% of the probes are occupied at equilibrium). Stringent conditions will be those in which the salt concentration is less than about 1.0 M sodium ion, typically about 0.01 to 1.0 M sodium ion concentration (or other salts) at pH 7.0 to 8.3 and the temperature is at least about 30° C. for short probes (e.g. 10 to 50 nucleotides) and at least about 60° C. for longer probes (e.g. greater than 50 nucleotides). In another embodiment, less stringent hybridization conditions are used; for example, moderate or low stringency conditions may be used, as are known in the art; see Maniatis and Ausubel, supra, and Tijssen, supra.

[0087] In addition, the CA nucleic acid sequences of the invention are fragments of larger genes, i.e. they are nucleic acid segments. Alternatively, the CA nucleic acid sequences can serve as indicators of oncogene position, for example, the CA sequence may be an enhancer that activates a protooncogene. “Genes” in this context includes coding regions, non-coding regions, and mixtures of coding and non-coding regions. Accordingly, as will be appreciated by those in the art, using the sequences provided herein, additional sequences of the CA genes can be obtained, using techniques well known in the art for cloning either longer sequences or the full-length sequences; see Maniatis et al., and Ausubel, et al., supra, hereby expressly incorporated by reference. In general, this is done using PCR, for example, kinetic PCR.

### Detection of CA Expression

[0088] Once the CA nucleic acid is identified, it can be cloned and, if necessary, its constituent parts recombined to form the entire CA nucleic acid. Once isolated from its natural source, e.g., contained within a plasmid or other vector or excised therefrom as a linear nucleic acid segment, the recombinant CA nucleic acid can be further used as a probe to identify and isolate other CA nucleic acids, for example additional coding regions. It can also be used as a “precursor” nucleic acid to make modified or variant CA nucleic acids and proteins. In a preferred embodiment, once a CA gene is identified its nucleotide sequence is used to design probes specific for the CA gene.

[0089] The CA nucleic acids of the present invention are used in several ways. In a first embodiment, nucleic acid probes hybridizable to CA nucleic acids are made and attached to biochips to be used in screening and diagnostic methods, or for gene therapy and/or antisense applications. Alternatively, the CA nucleic acids that include coding regions of CA proteins can be put into expression vectors for the expression of CA proteins, again either for screening purposes or for administration to a patient.

[0090] Recent developments in DNA microarray technology make it possible to conduct a large scale assay of a plurality of target CA nucleic acid molecules on a single solid phase support. U.S. Pat. No. 5,837,832 (Chee et al.) and related patent applications describe immobilizing an array of oligonucleotide probes for hybridization and detection of specific nucleic acid sequences in a sample. Target polynucleotides of interest isolated from a tissue of interest are hybridized to the DNA chip and the specific sequences detected based on the target polynucleotides' preference and degree of hybridization at discrete probe locations. One important use of arrays is in the analysis of differential gene expression, where the profile of expression of genes in different cells, often a cell of interest and a control cell, is compared and any differences in gene expression among the respective cells are identified. Such information is useful for the identification of the types of genes expressed in a particular cell or tissue type and diagnosis of cancer conditions based on the expression profile.

[0091] Typically, RNA from the sample of interest is subjected to reverse transcription to obtain labeled cDNA. See U.S. Pat. No. 6,410,229 (Lockhart et al.) The cDNA is then hybridized to oligonucleotides or cDNAs of known sequence arrayed on a chip or other surface in a known order. The location of the oligonucleotide to which the labeled cDNA hybridizes provides sequence information on the cDNA, while the amount of labeled hybridized RNA or cDNA provides an estimate of the relative representation of the RNA or cDNA of interest. See Schena, et al. Science 270:467-470 (1995). For example, use of a cDNA microarray to analyze gene expression patterns in human cancer is described by DeRisi, et al. (Nature Genetics 14:457-460 (1996)).

[0092] In a preferred embodiment, nucleic acid probes corresponding to CA nucleic acids (both the nucleic acid sequences outlined in the figures and/or the complements thereof) are made. Typically, these probes are synthesized based on the disclosed sequences of this invention. The nucleic acid probes attached to the biochip are designed to be substantially complementary to the CA nucleic acids, i.e. the target sequence (either the target sequence of the sample or to other probe sequences, for example in sandwich assays), such that specific hybridization of the target sequence and the probes of the present invention occurs. As outlined below, this complementarity need not be perfect, in that there may be any number of base pair mismatches that will interfere with hybridization between the target sequence and the single stranded nucleic acids of the present invention. It is expected that the overall homology of the genes at the nucleotide level probably will be about 40% or greater, probably about 60% or greater, and even more probably about 80% or greater; and in addition that there will be corresponding contiguous sequences of about 8-12 nucleotides or longer. However, if the number of mutations is so great that no hybridization can occur under even the least stringent of hybridization conditions, the sequence is not a complementary target sequence. Thus, by “substantially complementary” herein is meant that the probes are sufficiently complementary to the target sequences to hybridize under normal reaction conditions, particularly high stringency conditions, as outlined herein. Whether or not a sequence is unique to a CA gene according to this invention can be determined by techniques known to those of skill in the art. For example, the sequence can be compared to sequences in databanks, e.g., GeneBank, to determine whether it is present in the uninfected host or other organisms. The sequence can also be compared to the known sequences of other viral agents, including those that are known to induce cancer.

[0093] A nucleic acid probe is generally single stranded but can be partly single and partly double stranded. The strandedness of the probe is dictated by the structure, composition, and properties of the target sequence. In general, the oligonucleotide probes range from about 6, 8, 10, 12, 15, 20, 30 to about 100 bases long, with from about 10 to about 80 bases being preferred, and from about 30 to about 50 bases being particularly preferred. That is, generally entire genes are rarely used as probes. In some embodiments, much longer nucleic acids can be used, up to hundreds of bases. The probes are sufficiently specific to hybridize to complementary template sequence under conditions known by those of skill in the art. The number of mismatches between the probes sequences and their complementary template (target) sequences to which they hybridize during hybridization generally do not exceed 15%, usually do not exceed 10% and preferably do not exceed 5%, as determined by FASTA (default settings).

[0094] Oligonucleotide probes can include the naturally-occurring heterocyclic bases normally found in nucleic acids (uracil, cytosine, thymine, adenine and guanine), as well as modified bases and base analogues. Any modified base or base analogue compatible with hybridization of the probe to a target sequence is useful in the practice of the invention. The sugar or glycoside portion of the probe can comprise deoxyribose, ribose, and/or modified forms of these sugars, such as, for example, 2′-O-alkyl ribose. In a preferred embodiment, the sugar moiety is 2′-deoxyribose; however, any sugar moiety that is compatible with the ability of the probe to hybridize to a target sequence can be used.

[0095] In one embodiment, the nucleoside units of the probe are linked by a phosphodiester backbone, as is well known in the art. In additional embodiments, internucleotide linkages can include any linkage known to one of skill in the art that is compatible with specific hybridization of the probe including, but not limited to phosphorothioate, methylphosphonate, sulfamate (e.g., U.S. Pat. No. 5,470,967) and polyamide (i.e., peptide nucleic acids). Peptide nucleic acids are described in Nielsen et al. (1991) Science 254: 1497-1500, U.S. Pat. No. 5,714,331, and Nielsen (1999) Curr. Opin. Biotechlnol. 10:71-75.

[0096] In certain embodiments, the probe can be a chimeric molecule; i.e., can comprise more than one type of base or sugar subunit, and/or the linkages can be of more than one type within the same primer. The probe can comprise a moiety to facilitate hybridization to its target sequence, as are known in the art, for example, intercalators and/or minor groove binders. Variations of the bases, sugars, and internucleoside backbone, as well as the presence of any pendant group on the probe, will be compatible with the ability of the probe to bind, in a sequence-specific fashion, with its target sequence. A large number of structural modifications, both known and to be developed, are possible within these bounds. Advantageously, the probes according to the present invention may have structural characteristics such that they allow the signal amplification, such structural characteristics being, for example, branched DNA probes as those described by Urdea et al. (Nucleic Acids Symp. Ser., 24:197-200 (1991)) or in the European Patent No. EP-0225,807. Moreover, synthetic methods for preparing the various heterocyclic bases, sugars, nucleosides and nucleotides that form the probe, and preparation of oligonucleotides of specific predetermined sequence, are well-developed and known in the art. A preferred method for oligonucleotide synthesis incorporates the teaching of U.S. Pat. No. 5,419,966.

[0097] Multiple probes may be designed for a particular target nucleic acid to account for polymorphism and/or secondary structure in the target nucleic acid, redundancy of data and the like. In some embodiments, where more than one probe per sequence is used, either overlapping probes or probes to different sections of a single target CA gene are used. That is, two, three, four or more probes, with three being preferred, are used to build in a redundancy for a particular target. The probes can be overlapping (i.e. have some sequence in common), or specific for distinct sequences of a CA gene. When multiple target polynucleotides are to be detected according to the present invention, each probe or probe group corresponding to a particular target polynucleotide is situated in a discrete area of the microarray.

[0098] Probes may be in solution, such as in wells or on the surface of a micro-array, or attached to a solid support. Examples of solid support materials that can be used include a plastic, a ceramic, a metal, a resin, a gel and a membrane. Useful types of solid supports include plates, beads, magnetic material, microbeads, hybridization chips, membranes, crystals, ceramics and self-assembling monolayers. A preferred embodiment comprises a two-dimensional or three-dimensional matrix, such as a gel or hybridization chip with multiple probe binding sites (Pevzner et al., J. Biomol. Struc. & Dyn. 9:399-410, 1991; Maskos and Southern, Nuc. Acids Res. 20:1679-84, 1992). Hybridization chips can be used to construct very large probe arrays that are subsequently hybridized with a target nucleic acid. Analysis of the hybridization pattern of the chip can assist in the identification of the target nucleotide sequence. Patterns can be manually or computer analyzed, but it is clear that positional sequencing by hybridization lends itself to computer analysis and automation. Algorithms and software, which have been developed for sequence reconstruction, are applicable to the methods described herein (R. Drmanac et al., J. Biomol. Struc. & Dyn. 5:1085-1102, 1991; P. A. Pevzner, J. Biomol. Struc. & Dyn. 7:63-73, 1989).

[0099] As will be appreciated by those in the art, nucleic acids can be attached or immobilized to a solid support in a wide variety of ways. By “immobilized” herein is meant the association or binding between the nucleic acid probe and the solid support is sufficient to be stable under the conditions of binding, washing, analysis, and removal as outlined below. The binding can be covalent or non-covalent. By “non-covalent binding” and grammatical equivalents herein is meant one or more of either electrostatic, hydrophilic, and hydrophobic interactions. Included in non-covalent binding is the covalent attachment of a molecule, such as streptavidin, to the support and the non-covalent binding of the biotinylated probe to the streptavidin. By “covalent binding” and grammatical equivalents herein is meant that the two moieties, the solid support and the probe, are attached by at least one bond, including sigma bonds, pi bonds and coordination bonds. Covalent bonds can be formed directly between the probe and the solid support or can be formed by a cross linker or by inclusion of a specific reactive group on either the solid support or the probe or both molecules. Immobilization may also involve a combination of covalent and non-covalent interactions.

[0100] Nucleic acid probes may be attached to the solid support by covalent binding such as by conjugation with a coupling agent or by, covalent or non-covalent binding such as electrostatic interactions, hydrogen bonds or antibody-antigen coupling, or by combinations thereof. Typical coupling agents include biotin/avidin, biotin/streptavidin, Staphylococcus aureus protein A/IgG antibody F_{c} fragment, and streptavidin/protein A chimeras (T. Sano and C. R. Cantor, Bio/Technology 9:1378-81 (1991)), or derivatives or combinations of these agents. Nucleic acids may be attached to the solid support by a photocleavable bond, an electrostatic bond, a disulfide bond, a peptide bond, a diester bond or a combination of these sorts of bonds. The array may also be attached to the solid support by a selectively releasable bond such as 4,4′-dimethoxytrityl or its derivative. Derivatives which have been found to be useful include 3 or 4[bis-(4-methoxyphenyl)]-methyl-benzoic acid, N-succinimidyl-3 or 4[bis-(4-methoxyphenyl)]-methyl-benzoic acid, N-succinimidyl-3 or 4[bis-(4-methoxyphenyl)]-hydroxymethyl-benzoic acid, N-succinimidyl-3 or 4[bis-(4-methoxyphenyl)]-chloromethyl-benzoic acid, and salts of these acids.

[0101] In general, the probes are attached to the biochip in a wide variety of ways, as will be appreciated by those in the art. As described herein, the nucleic acids can either be synthesized first, with subsequent attachment to the biochip, or can be directly synthesized on the biochip.

[0102] The biochip comprises a suitable solid substrate. By “substrate” or “solid support” or other grammatical equivalents herein is meant any material that can be modified to contain discrete individual sites appropriate for the attachment or association of the nucleic acid probes and is amenable to at least one detection method. The solid phase support of the present invention can be of any solid materials and structures suitable for supporting nucleotide hybridization and synthesis. Preferably, the solid phase support comprises at least one substantially rigid surface on which the primers can be immobilized and the reverse transcriptase reaction performed. The substrates with which the polynucleotide microarray elements are stably associated may be fabricated from a variety of materials, including plastics, ceramics, metals, acrylamide, cellulose, nitrocellulose, glass, polystyrene, polyethylene vinyl acetate, polypropylene, polymethacrylate, polyethylene, polyethylene oxide, polysilicates, polycarbonates, Teflon®, fluorocarbons, nylon, silicon rubber, polyanhydrides, polyglycolic acid, polylactic acid, polyorthoesters, polypropylfumerate, collagen, glycosaminoglycans, and polyamino acids. Substrates may be two-dimensional or three-dimensional in form, such as gels, membranes, thin films, glasses, plates, cylinders, beads, magnetic beads, optical fibers, woven fibers, etc. A preferred form of array is a three-dimensional array. A preferred three-dimensional array is a collection of tagged beads. Each tagged bead has different primers attached to it. Tags are detectable by signaling means such as color (Luminex, Illumina) and electromagnetic field (Pharmaseq) and signals on tagged beads can even be remotely detected (e.g., using optical fibers). The size of the solid support can be any of the standard microarray sizes, useful for DNA microarray technology, and the size may be tailored to fit the particular machine being used to conduct a reaction of the invention. In general, the substrates allow optical detection and do not appreciably fluoresce.

[0103] In a preferred embodiment, the surface of the biochip and the probe may be derivatized with chemical functional groups for subsequent attachment of the two. Thus, for example, the biochip is derivatized with a chemical functional group including, but not limited to, amino groups, carboxy groups, oxo groups and thiol groups, with amino groups being particularly preferred. Using these functional groups, the probes can be attached using functional groups on the probes. For example, nucleic acids containing amino groups can be attached to surfaces comprising amino groups, for example using linkers as are known in the art; for example, homo- or hetero-bifunctional linkers as are well known (see 1994 Pierce Chemical Company catalog, technical section on cross-linkers, pages 155-200, incorporated herein by reference). In addition, in some cases, additional linkers, such as alkyl groups (including substituted and heteroalkyl groups) may be used.

[0104] In this embodiment, the oligonucleotides are synthesized as is known in the art, and then attached to the surface of the solid support. As will be appreciated by those skilled in the art, either the 5′ or 3′ terminus may be attached to the solid support, or attachment may be via an internal nucleoside. In an additional embodiment, the immobilization to the solid support may be very strong, yet non-covalent. For example, biotinylated oligonucleotides can be made, which bind to surfaces covalently coated with streptavidin, resulting in attachment.

[0105] The arrays may be produced according to any convenient methodology, such as preforming the polynucleotide microarray elements and then stably associating them with the surface. Alternatively, the oligonucleotides may be synthesized on the surface, as is known in the art. A number of different array configurations and methods for their production are known to those of skill in the art and disclosed in WO 95/25116 and WO 95/35505 (photolithographic techniques), U.S. Pat. No. 5,445,934 (in situ synthesis by photolithography), U.S. Pat. No. 5,384,261 (in situ synthesis by mechanically directed flow paths); and U.S. Pat. No. 5,700,637 (synthesis by spotting, printing or coupling); the disclosure of which are herein incorporated in their entirety by reference. Another method for coupling DNA to beads uses specific ligands attached to the end of the DNA to link to ligand-binding molecules attached to a bead. Possible ligand-binding partner pairs include biotin-avidin/streptavidin, or various antibody/antigen pairs such as digoxygenin-antidigoxygenin antibody (Smith et al., “Direct Mechanical Measurements of the Elasticity of Single DNA Molecules by Using Magnetic Beads,” Science 258:1122-1126 (1992)). Covalent chemical attachment of DNA to the support can be accomplished by using standard coupling agents to link the 5′-phosphate on the DNA to coated microspheres through a phosphoamidate bond. Methods for immobilization of oligonucleotides to solid-state substrates are well established. See Pease et al., Proc. Natl. Acad. Sci. USA 91(11):5022-5026 (1994). A preferred method of attaching oligonucleotides to solid-state substrates is described by Guo et al., Nucleic Acids Res. 22:5456-5465 (1994). Immobilization can be accomplished either by in situ DNA synthesis (Maskos and Southern, Nucleic Acids Research, 20:1679-1684 (1992) or by covalent attachment of chemically synthesized oligonucleotides (Guo et al., supra) in combination with robotic arraying technologies.

[0106] In addition to the solid-phase technology represented by biochip arrays, gene expression can also be quantified using liquid-phase arrays. One such system is kinetic polymerase chain reaction (PCR). Kinetic PCR allows for the simultaneous amplification and quantification of specific nucleic acid sequences. The specificity is derived from synthetic oligonucleotide primers designed to preferentially adhere to single-stranded nucleic acid sequences bracketing the target site. This pair of oligonucleotide primers form specific, non-covalently bound complexes on each strand of the target sequence. These complexes facilitate in vitro transcription of double-stranded DNA in opposite orientations. Temperature cycling of the reaction mixture creates a continuous cycle of primer binding, transcription, and re-melting of the nucleic acid to individual strands. The result is an exponential increase of the target dsDNA product. This product can be quantified in real time either through the use of an intercalating dye or a sequence specific probe. SYBR® Greene I, is an example of an intercalating dye, that preferentially binds to dsDNA resulting in a concomitant increase in the fluorescent signal. Sequence specific probes, such as used with TaqMan® technology, consist of a fluorochrome and a quenching molecule covalently bound to opposite ends of an oligonucleotide. The probe is designed to selectively bind the target DNA sequence between the two primers. When the DNA strands are synthesized during the PCR reaction, the fluorochrome is cleaved from the probe by the exonuclease activity of the polymerase resulting in signal dequenching. The probe signaling method can be more specific than the intercalating dye method, but in each case, signal strength is proportional to the dsDNA product produced. Each type of quantification method can be used in multi-well liquid phase arrays with each well representing primers and/or probes specific to nucleic acid sequences of interest. When used with messenger RNA preparations of tissues or cell lines, an array of probe/primer reactions can simultaneously quantify the expression of multiple gene products of interest. See Germer, S., et al., Genome Res. 10:258-266 (2000); Heid, C. A., et al., Genome Res. 6, 986-994 (1996).

### Expression of CA Proteins

[0107] In a preferred embodiment, CA nucleic acids encoding CA proteins are used to make a variety of expression vectors to express CA proteins which can then be used in screening assays, as described below. The expression vectors may be either self-replicating extrachromosomal vectors or vectors which integrate into a host genome. Generally, these expression vectors include transcriptional and translational regulatory nucleic acid operably linked to the nucleic acid encoding the CA protein. The term “control sequences” refers to DNA sequences necessary for the expression of an operably linked coding sequence in a particular host organism. The control sequences that are suitable for prokaryotes, for example, include a promoter, optionally an operator sequence, and a ribosome binding site. Eukaryotic cells are known to utilize promoters, polyadenylation signals, and enhancers.

[0108] Nucleic acid is “operably linked” when it is placed into a functional relationship with another nucleic acid sequence. For example, DNA for a presequence or secretory leader is operably linked to DNA for a polypeptide if it is expressed as a preprotein that participates in the secretion of the polypeptide; a promoter or enhancer is operably linked to a coding sequence if it affects the transcription of the sequence; or a ribosome binding site is operably linked to a coding sequence if it is positioned so as to facilitate translation. Generally, “operably linked” means that the DNA sequences being linked are contiguous, and, in the case of a secretory leader, contiguous and in reading phase. However, enhancers do not have to be contiguous. Linking is accomplished by ligation at convenient restriction sites. If such sites do not exist, synthetic oligonucleotide adaptors or linkers are used in accordance with conventional practice. The transcriptional and translational regulatory nucleic acid will generally be appropriate to the host cell used to express the CA protein; for example, transcriptional and translational regulatory nucleic acid sequences from Bacillus are preferably used to express the CA protein in Bacillus. Numerous types of appropriate expression vectors, and suitable regulatory sequences are known in the art for a variety of host cells.

[0109] In general, the transcriptional and translational regulatory sequences may include, but are not limited to, promoter sequences, ribosomal binding sites, transcriptional start and stop sequences, translational start and stop sequences, and enhancer or activator sequences. In a preferred embodiment, the regulatory sequences include a promoter and transcriptional start and stop sequences.

[0110] Promoter sequences encode either constitutive or inducible promoters. The promoters may be either naturally occurring promoters or hybrid promoters. Hybrid promoters, which combine elements of more than one promoter, are also known in the art, and are useful in the present invention.

[0111] In addition, the expression vector may comprise additional elements. For example, the expression vector may have two replication systems, thus allowing it to be maintained in two organisms, for example in mammalian or insect cells for expression and in a prokaryotic host for cloning and amplification. Furthermore, for integrating expression vectors, the expression vector contains at least one sequence homologous to the host cell genome, and preferably two homologous sequences that flank the expression construct. The integrating vector may be directed to a specific locus in the host cell by selecting the appropriate homologous sequence for inclusion in the vector. Constructs for integrating vectors are well known in the art.

[0112] In addition, in a preferred embodiment, the expression vector contains a selectable marker gene to allow the selection of transformed host cells. Selection genes are well known in the art and will vary with the host cell used.

[0113] The CA proteins of the present invention are produced by culturing a host cell transformed with an expression vector containing nucleic acid encoding a CA protein, under the appropriate conditions to induce or cause expression of the CA protein. The conditions appropriate for CA protein expression will vary with the choice of the expression vector and the host cell, and will be easily ascertained by one skilled in the art through routine experimentation. For example, the use of constitutive promoters in the expression vector will require optimizing the growth and proliferation of the host cell, while the use of an inducible promoter requires the appropriate growth conditions for induction. In addition, in some embodiments, the timing of the harvest is important. For example, the baculoviral systems used in insect cell expression are lytic viruses, and thus harvest time selection can be crucial for product yield.

[0114] Appropriate host cells include yeast, bacteria, archaebacteria, fungi, and insect, plant and animal cells, including mammalian cells. Of particular interest are Drosophila melanogaster cells, Saccharomyces cerevisiae and other yeasts, E. coli, Bacillus subtilis, Sf9 cells, C129 cells, 293 cells, Neurospora, BHK, CHO, COS, HeLa cells, THP1 cell line (a macrophage cell line) and human cells and cell lines.

[0115] In a preferred embodiment, the CA proteins are expressed in mammalian cells. Mammalian expression systems are also known in the art, and include retroviral systems. A preferred expression vector system is a retroviral vector system such as is generally described in PCT/US97/01019 and PCT/US97/01048, both of which are hereby expressly incorporated by reference. Of particular use as mammalian promoters are the promoters from mammalian viral genes, since the viral genes are often highly expressed and have a broad host range. Examples include the SV40 early promoter, mouse mammary tumor virus LTR promoter, adenovirus major late promoter, herpes simplex virus promoter, and the CMV promoter. Typically, transcription termination and polyadenylation sequences recognized by mammalian cells are regulatory regions located 3′ to the translation stop codon and thus, together with the promoter elements, flank the coding sequence. Examples of transcription terminator and polyadenylation signals include those derived form SV40.

[0116] The methods of introducing exogenous nucleic acid into mammalian hosts, as well as other hosts, are well known in the art, and will vary with the host cell used. Techniques include dextran-mediated transfection, calcium phosphate precipitation, polybrene mediated transfection, protoplast fusion, electroporation, viral infection, encapsulation of the polynucleotide(s) in liposomes, and direct microinjection of the DNA into nuclei.

[0117] In a preferred embodiment, CA proteins are expressed in bacterial systems. Bacterial expression systems are well known in the art. Promoters from bacteriophage may also be used and are known in the art. In addition, synthetic promoters and hybrid promoters are also useful; for example, the tac promoter is a hybrid of the trp and lac promoter sequences. Furthermore, a bacterial promoter can include naturally occurring promoters of non-bacterial origin that have the ability to bind bacterial RNA polymerase and initiate transcription. In addition to a functioning promoter sequence, an efficient ribosome binding site is desirable. The expression vector may also include a signal peptide sequence that provides for secretion of the CA protein in bacteria. The protein is either secreted into the growth media (gram-positive bacteria) or into the periplasmic space, located between the inner and outer membrane of the cell (gram-negative bacteria). The bacterial expression vector may also include a selectable marker gene to allow for the selection of bacterial strains that have been transformed. Suitable selection genes include genes that render the bacteria resistant to drugs such as ampicillin, chloramphenicol, erythromycin, kanamycin, neomycin and tetracycline. Selectable markers also include biosynthetic genes, such as those in the histidine, tryptophan and leucine biosynthetic pathways. These components are assembled into expression vectors. Expression vectors for bacteria are well known in the art, and include vectors for Bacillus subtilis, E. coli, Streptococcus cremoris, and Streptococcus lividans, among others. The bacterial expression vectors are transformed into bacterial host cells using techniques well known in the art, such as calcium chloride treatment, electroporation, and others.

[0118] In one embodiment, CA proteins are produced in insect cells. Expression vectors for the transformation of insect cells, and in particular, baculovirus-based expression vectors, are well known in the art.

[0119] In a preferred embodiment, CA protein is produced in yeast cells. Yeast expression systems are well known in the art, and include expression vectors for Saccharomyces cerevisiae, Candida albicans and C. maltosa, Hansenula polymorpha, Kluyveromyces fragilis and K. lactis, Pichia guillerimondii and P. pastoris, Schizosaccharomyces pombe, and Yarrowia lipolytica.

[0120] The CA protein may also be made as a fusion protein, using techniques well known in the art. Thus, for example, for the creation of monoclonal antibodies. If the desired epitope is small, the CA protein may be fused to a carrier protein to form an immunogen. Alternatively, the CA protein may be made as a fusion protein to increase expression, or for other reasons. For example, when the CA protein is a CA peptide, the nucleic acid encoding the peptide may be linked to other nucleic acid for expression purposes.

[0121] In one embodiment, the CA nucleic acids, proteins and antibodies of the invention are labeled. By “labeled” herein is meant that a compound has at least one element, isotope or chemical compound attached to enable the detection of the compound. In general, labels fall into three classes: a) isotopic labels, which may be radioactive or heavy isotopes; b) immune labels, which may be antibodies or antigens; and c) colored or fluorescent dyes. The labels may be incorporated into the CA nucleic acids, proteins and antibodies at any position. For example, the label should be capable of producing, either directly or indirectly, a detectable signal. The detectable moiety may be a radioisotope, such as ³H, ¹⁴C, ³²P, ³⁵S, or ¹²⁵I, a fluorescent or chemiluminescent compound, such as fluorescein isothiocyanate, rhodamine, or luciferin, or an enzyme, such as alkaline phosphatase, beta-galactosidase or horseradish peroxidase. Any method known in the art for conjugating the antibody to the label may be employed, including those methods described by Hunter et al., Nature, 144:945 (1962); David et al., Biochemistry, 13:1014 (1974); Pain et al., J. Immunol. Meth., 40:219 (1981); and Nygren, J. Histochem. and Cytochem., 30:407 (1982).

[0122] Accordingly, the present invention also provides CA protein sequences. A CA protein of the present invention may be identified in several ways. “Protein” in this sense includes proteins, polypeptides, and peptides. As will be appreciated by those in the art, the nucleic acid sequences of the invention can be used to generate protein sequences. There are a variety of ways to do this, including cloning the entire gene and verifying its frame and amino acid sequence, or by comparing it to known sequences to search for homology to provide a frame, assuming the CA protein has homology to some protein in the database being used. Generally, the nucleic acid sequences are input into a program that will search all three frames for homology. This is done in a preferred embodiment using the following NCBI Advanced BLAST parameters. The program is blastx or blastn. The database is nr. The input data is as “Sequence in FASTA format”. The organism list is “none”. The “expect” is 10; the filter is default. The “descriptions” is 500, the “alignments” is 500, and the “alignment view” is pairwise. The “query Genetic Codes” is standard (1). The matrix is BLOSUM 62; gap existence cost is 11, per residue gap cost is 1; and the lambda ratio is 0.85 default. This results in the generation of a putative protein sequence.

[0123] In general, the term “polypeptide” as used herein refers to both the full-length polypeptide encoded by the recited polynucleotide, the polypeptide encoded by the gene represented by the recited polynucleotide, as well as portions or fragments thereof. The present invention encompasses variants of the naturally occurring proteins, wherein such variants are homologous or substantially similar to the naturally occurring protein, and can be of an origin of the same or different species as the naturally occurring protein (e.g., human, murine, or some other species that naturally expresses the recited polypeptide, usually a mammalian species). In general, variant polypeptides have a sequence that has at least about 80%, at least about 81%, at least about 82%, at least about 83%, at least about 84%, at least about 85%, at least about 86%, at least about 87%, at least about 88%, at least about 89%, usually at least about 90%, at least 91%, at least 92%, at least 93%, at least 94%, at least 95%, at least 96%, at least 97%, at least 98% and more usually at least about 99% sequence identity with a differentially expressed polypeptide described herein, as determined by the Smith-Waterman homology search algorithm using an affine gap search with a gap open penalty of 12 and a gap extension penalty of 2, BLOSUM matrix of 62. The Smith-Waterman homology search algorithm is taught in Smith and Waterman, Adv. Appl. Math. (1981) 2: 482-489. The variant polypeptides can be naturally or non-naturally glycosylated, i.e., the polypeptide has a glycosylation pattern that differs from the glycosylation pattern found in the corresponding naturally occurring protein.

[0124] Also within the scope of the invention are variants. Variants of polypeptides include mutants, fragments, and fusions. Mutants can include amino acid substitutions, additions or deletions. The amino acid substitutions can be conservative amino acid substitutions or substitutions to eliminate non-essential amino acids, such as to alter a glycosylation site, a phosphorylation site or an acetylation site, or to minimize misfolding by substitution or deletion of one or more cysteine residues that are not necessary for function. Conservative amino acid substitutions are those that preserve the general charge, hydrophobicity/hydrophilicity, and/or steric bulk of the amino acid substituted. Variants can be designed so as to retain or have enhanced biological activity of a particular region of the protein (e.g., a functional domain and/or, where the polypeptide is a member of a protein family, a region associated with a consensus sequence). Selection of amino acid alterations for production of variants can be based upon the accessibility (interior vs. exterior) of the amino acid (see, e.g., Go et al, Int. J. Peptide Protein Res. (1980) 15:211), the thermostability of the variant polypeptide (see, e.g., Querol et al., Prot. Eng. (1996) 9:265), desired glycosylation sites (see, e.g., Olsen and Thomsen, J. Gen. Microbiol. (1991) 137:579), desired disulfide bridges (see, e.g., Clarke et al., Biochemistry (1993) 32:4322; and Wakarchuk et al., Protein Eng. (1994) 7:1379), desired metal binding sites (see, e.g., Toma et al., Biochemistry (1991) 30:97, and Haezerbrouck et al., Protein Eng. (1993) 6:643), and desired substitutions within proline loops (see, e.g., Masul et al., Appl. Env. Microbiol. (1994) 60:3579). Cysteine-depleted muteins can be produced as disclosed in U.S. Pat. No. 4,959,314.

[0125] Variants also include fragments of the polypeptides disclosed herein, particularly biologically active fragments and/or fragments corresponding to functional domains. Fragments of interest will typically be at least about 8 amino acids (aa) 10 aa, 15 aa, 20 aa, 25 aa, 30 aa, 35 aa, 40 aa, to at least about 45 aa in length, usually at least about 50 aa in length, at least about 75 aa, at least about 100 aa, at least about 125 aa, at least about 150 aa in length, at least about 200 aa, at least about 300 aa, at least about 400 aa and can be as long as 500 aa in length or longer, but will usually not exceed about 1000 aa in length, where the fragment will have a stretch of amino acids that is identical to a polypeptide encoded by a polynucleotide having a sequence of any one of the polynucleotide sequences provided herein, or a homolog thereof. The protein variants described herein are encoded by polynucleotides that are within the scope of the invention. The genetic code can be used to select the appropriate codons to construct the corresponding variants.

[0126] While altered expression of the polynucleotides associated with cancer is observed, altered levels of expression of the polypeptides encoded by these polynucleotides may likely play a role in cancers.

[0127] Also included within one embodiment of CA proteins are amino acid variants of the naturally occurring sequences, as determined herein. Preferably, the variants are preferably greater than about 75% homologous to the wild-type sequence, more preferably greater than about 80%, even more preferably greater than about 85% and most preferably greater than 90%. The present application is also directed to proteins containing polypeptides at least 80%, 85%, 90%, 95%, 96%, 97%, 98% or 99% identical to a CA polypeptide sequence set forth herein. As for nucleic acids, homology in this context means sequence similarity or identity, with identity being preferred. This homology will be determined using standard techniques known in the art as are outlined above for the nucleic acid homologies.

[0128] CA proteins of the present invention may be shorter or longer than the wild type amino acid sequences. Thus, in a preferred embodiment, included within the definition of CA proteins are portions or fragments of the wild type sequences herein. In addition, as outlined above, the CA nucleic acids of the invention may be used to obtain additional coding regions, and thus additional protein sequence, using techniques known in the art.

[0129] In a preferred embodiment, the CA proteins are derivative or variant CA proteins as compared to the wild-type sequence. That is, as outlined more fully below, the derivative CA peptide will contain at least one amino acid substitution, deletion or insertion, with amino acid substitutions being particularly preferred. The amino acid substitution, insertion or deletion may occur at any residue within the CA peptide.

[0130] Also included in an embodiment of CA proteins of the present invention are amino acid sequence variants. These variants fall into one or more of three classes: substitutional, insertional or deletional variants. These variants ordinarily are prepared by site-specific mutagenesis of nucleotides in the DNA encoding the CA protein, using cassette or PCR mutagenesis or other techniques well known in the art, to produce DNA encoding the variant, and thereafter expressing the DNA in recombinant cell culture as outlined above. However, variant CA protein fragments having up to about 100-150 residues may be prepared by in vitro synthesis using established techniques. Amino acid sequence variants are characterized by the predetermined nature of the variation, a feature that sets them apart from naturally occurring allelic or interspecies variation of the CA protein amino acid sequence. The variants typically exhibit the same qualitative biological activity as the naturally occurring analogue, although variants can also be selected which have modified characteristics as will be more fully outlined below.

[0131] While the site or region for introducing an amino acid sequence variation is predetermined, the mutation per se need not be predetermined. For example, in order to optimize the performance of a mutation at a given site, random mutagenesis may be conducted at the target codon or region and the expressed CA variants screened for the optimal combination of desired activity. Techniques for making substitution mutations at predetermined sites in DNA having a known sequence are well known, for example, M13 primer mutagenesis and LAR mutagenesis. Screening of the mutants is done using assays of CA protein activities.

[0132] Amino acid substitutions are typically of single residues; insertions usually will be on the order of from about 1 to 20 amino acids, although considerably larger insertions may be tolerated. Deletions range from about 1 to about 20 residues, although in some cases deletions may be much larger.

[0133] Substitutions, deletions, insertions or any combination thereof may be used to arrive at a final derivative. Generally these changes are done on a few amino acids to minimize the alteration of the molecule. However, larger changes may be tolerated in certain circumstances. When small alterations in the characteristics of the CA protein are desired, substitutions are generally made in accordance with the following chart:

[0134] Substantial changes in function or immunological identity are made by selecting substitutions that are less conservative than those shown in Chart I. For example, substitutions may be made full length to more significantly affect one or more of the following: the structure of the polypeptide backbone in the area of the alteration (e.g., the alpha-helical or beta-sheet structure); the charge or hydrophobicity of the molecule at the target site; and the bulk of the side chain. The substitutions which in general are expected to produce the greatest changes in the polypeptide's properties are those in which (a) a hydrophilic residue, e.g. seryl or threonyl is substituted for (or by) a hydrophobic residue, e.g. leucyl, isoleucyl, phenylalanyl, valyl or alanyl; (b) a cysteine or proline is substituted for (or by) any other residue; (c) a residue having an electropositive side chain, e.g. lysyl, arginyl, or histidyl, is substituted for (or by) an electronegative residue, e.g. glutamyl or aspartyl; or (d) a residue having a bulky side chain, e.g. phenylalanine, is substituted for (or by) one not having a side chain, e.g. glycine.

[0135] The variants typically exhibit the same qualitative biological activity and will elicit the same immune response as the naturally-occurring analogue, although variants also are selected to modify the characteristics of the CA proteins as needed. Alternatively, the variant may be designed such that the biological activity of the CA protein is altered. For example, glycosylation sites may be altered or removed, dominant negative mutations created, etc.

[0136] Covalent modifications of CA polypeptides are included within the scope of this invention, for example for use in screening. One type of covalent modification includes reacting targeted amino acid residues of a CA polypeptide with an organic derivatizing agent that is capable of reacting with selected side chains or the N- or C-terminal residues of a CA polypeptide. Derivatization with bifunctional agents is useful, for instance, for crosslinking CA polypeptides to a water-insoluble support matrix or surface for use in the method for purifying anti-CA antibodies or screening assays, as is more fully described below. Commonly used crosslinking agents include, e.g., 1,1-bis(diazoacetyl)-2-phenylethane, glutaraldehyde, N-hydroxysuccinimide esters, for example, esters with 4-azidosalicylic acid, homobifunctional imidoesters, including disuccinimidyl esters such as 3,3′-dithiobis(succinimidylpropionate), bifunctional maleimides such as bis-N-maleimido-1,8-octane and agents such as methyl-3-[(p-azidophenyl)dithio]propioimidate.

[0137] Other modifications include deamidation of glutaminyl and asparaginyl residues to the corresponding glutamyl and aspartyl residues, respectively, hydroxylation of proline and lysine, phosphorylation of hydroxyl groups of seryl, threonyl or tyrosyl residues, methylation of the a-amino groups of lysine, arginine, and histidine side chains [T. E. Creighton, Proteins: Structure and Molecular Properties, W.H. Freeman & Co., San Francisco, pp. 79-86 (1983)], acetylation of the N-terminal amine, and amidation of any C-terminal carboxyl group.

[0138] Another type of covalent modification of the CA polypeptide included within the scope of this invention comprises altering the native glycosylation pattern of the polypeptide. “Altering the native glycosylation pattern” is intended for purposes herein to mean deleting one or more carbohydrate moieties found in native sequence CA polypeptide, and/or adding one or more glycosylation sites that are not present in the native sequence CA polypeptide.

[0139] Addition of glycosylation sites to CA polypeptides may be accomplished by altering the amino acid sequence thereof. The alteration may be made, for example, by the addition of, or substitution by, one or more serine or threonine residues to the native sequence CA polypeptide (for O-linked glycosylation sites). The CA amino acid sequence may optionally be altered through changes at the DNA level, particularly by mutating the DNA encoding the CA polypeptide at preselected bases such that codons are generated that will translate into the desired amino acids.

[0140] Another means of increasing the number of carbohydrate moieties on the CA polypeptide is by chemical or enzymatic coupling of glycosides to the polypeptide. Such methods are described in the art, e.g., in WO 87/05330 published 11 Sep. 1987, and in Aplin and Wriston, LA Crit. Rev. Biochem., pp. 259-306 (1981).

[0141] Removal of carbohydrate moieties present on the CA polypeptide may be accomplished chemically or enzymatically or by mutational substitution of codons encoding for amino acid residues that serve as targets for glycosylation. Chemical deglycosylation techniques are known in the art and described, for instance, by Hakimuddin, et al., Arch. Biochem. Biophys., 259:52 (1987) and by Edge et al., Anal. Biochem., 118:131 (1981). Enzymatic cleavage of carbohydrate moieties on polypeptides can be achieved by the use of a variety of endo- and exo-glycosidases as described by Thotakura et al., Meth. Enzymol., 138:350 (1987).

[0142] Another type of covalent modification of CA comprises linking the CA polypeptide to one of a variety of nonproteinaceous polymers, e.g., polyethylene glycol, polypropylene glycol, or polyoxyalkylenes, in the manner set forth in U.S. Pat. No. 4,640,835; 4,496,689; 4,301,144; 4,670,417; 4,791,192 or 4,179,337.

[0143] CA polypeptides of the present invention may also be modified in a way to form chimeric molecules comprising a CA polypeptide fused to another, heterologous polypeptide or amino acid sequence. In one embodiment, such a chimeric molecule comprises a fusion of a CA polypeptide with a tag polypeptide that provides an epitope to which an anti-tag antibody can selectively bind. The epitope tag is generally placed at the amino- or carboxyl-terminus of the CA polypeptide, although internal fusions may also be tolerated in some instances. The presence of such epitope-tagged forms of a CA polypeptide can be detected using an antibody against the tag polypeptide. Also, provision of the epitope tag enables the CA polypeptide to be readily purified by affinity purification using an anti-tag antibody or another type of affinity matrix that binds to the epitope tag. In an alternative embodiment, the chimeric molecule may comprise a fusion of a CA polypeptide with an immunoglobulin or a particular region of an immunoglobulin. For a bivalent form of the chimeric molecule, such a fusion could be to the Fc region of an IgG molecule.

[0144] Various tag polypeptides and their respective antibodies are well known in the art. Examples include poly-histidine (poly-his) or poly-histidine-glycine (poly-his-gly) tags; the flu HA tag polypeptide and its antibody 12CA5 [Field et al., Mol. Cell. Biol., 8:2159-2165 (1988)]; the c-myc tag and the 8F9, 3C7, 6E10, G4, B7 and 9E10 antibodies thereto [Evan et al., Molecular and Cellular Biology, 5:3610-3616 (1985)]; and the Herpes Simplex virus glycoprotein D (gD) tag and its antibody [Paborsky et al., Protein Engineering, 3(6):547-553 (1990)]. Other tag polypeptides include the Flag-peptide [Hopp et al., BioTechnology, 6:1204-1210 (1988)]; the KT3 epitope peptide [Martin et al., Science, 255:192-194 (1992)]; tubulin epitope peptide [Skinner et al., J. Biol. Chem., 266:15163-15166 (1991)]; and the T7 gene 10 protein peptide tag [Lutz-Freyermuth et al., Proc. Natl. Acad. Sci. USA, 87:6393-6397 (1990)].

[0145] Also included with the definition of CA protein in one embodiment are other CA proteins of the CA family, and CA proteins from other organisms, which are cloned and expressed as outlined below. Thus, probe or degenerate polymerase chain reaction (PCR) primer sequences may be used to find other related CA proteins from humans or other organisms. As will be appreciated by those in the art, particularly useful probe and/or PCR primer sequences include the unique areas of the CA nucleic acid sequence. As is generally known in the art, preferred PCR primers are from about 15 to about 35 nucleotides in length, with from about 20 to about 30 being preferred, and may contain inosine as needed. The conditions for the PCR reaction are well known in the art.

[0146] In addition, as is outlined herein, CA proteins can be made that are longer than those encoded by the nucleic acids of the figures, for example, by the elucidation of additional sequences, the addition of epitope or purification tags, the addition of other fusion sequences, etc.

[0147] CA proteins may also be identified as being encoded by CA nucleic acids. Thus, CA proteins are encoded by nucleic acids that will hybridize to the sequences of the sequence listings, or their complements, as outlined herein.

### CA Antigens and Antibodies Thereto

[0148] In one embodiment, the invention provides CA specific antibodies. In a preferred embodiment, when the CA protein is to be used to generate antibodies, for example for immunotherapy, the CA protein should share at least one epitope or determinant with the full-length protein. By “epitope” or “determinant” herein is meant a portion of a protein that will generate and/or bind an antibody or T-cell receptor in the context of MHC. Thus, in most instances, antibodies made to a smaller CA protein will be able to bind to the full-length protein. In a preferred embodiment, the epitope is unique; that is, antibodies generated to a unique epitope show little or no cross-reactivity.

[0149] Any polypeptide sequence encoded by the CA polynucleotide sequences may be analyzed to determine certain preferred regions of the polypeptide. Regions of high antigenicity are determined from data by DNASTAR analysis by choosing values that represent regions of the polypeptide that are likely to be exposed on the surface of the polypeptide in an environment in which antigen recognition may occur in the process of initiation of an immune response. For example, the amino acid sequence of a polypeptide encoded by a CA polynucleotide sequence may be analyzed using the default parameters of the DNASTAR computer algorithm (DNASTAR, Inc., Madison, Wis.; http://www.dnastar.com/).

[0150] Polypeptide features that may be routinely obtained using the DNASTAR computer algorithm include, but are not limited to, Garnier-Robson alpha-regions, beta-regions, turn-regions, and coil-regions (Garnier et al. J. Mol. Biol., 120: 97 (1978)); Chou-Fasman alpha-regions, beta-regions, and turn-regions (Adv. in Enzymol., 47:45-148 (1978)); Kyte-Doolittle hydrophilic regions and hydrophobic regions (J. Mol. Biol., 157:105-132 (1982)); Eisenberg alpha- and beta-amphipathic regions; Karplus-Schulz flexible regions; Emini surface-forming regions (J. Virol., 55(3):836-839 (1985)); and Jameson-Wolf regions of high antigenic index (CABIOS, 4(1):181-186 (1988)). Kyte-Doolittle hydrophilic regions and hydrophobic regions, Emini surface-forming regions, and Jameson-Wolf regions of high antigenic index (i.e., containing four or more contiguous amino acids having an antigenic index of greater than or equal to 1.5, as identified using the default parameters of the Jameson-Wolf program) can routinely be used to determine polypeptide regions that exhibit a high degree of potential for antigenicity. One approach for preparing antibodies to a protein is the selection and preparation of an amino acid sequence of all or part of the protein, chemically synthesizing the sequence and injecting it into an appropriate animal, typically a rabbit, hamster or a mouse. Oligopeptides can be selected as candidates for the production of an antibody to the CA protein based upon the oligopeptides lying in hydrophilic regions, which are thus likely to be exposed in the mature protein. Additional oligopeptides can be determined using, for example, the Antigenicity Index, Welling, G. W. et al., FEBS Lett. 188:215-218 (1985), incorporated herein by reference.

[0151] In one embodiment, the term “antibody” includes antibody fragments, as are known in the art, including Fab, Fab₂, single chain antibodies (Fv for example), chimeric antibodies, etc., either produced by the modification of whole antibodies or those synthesized de novo using recombinant DNA technologies.

[0152] Methods of preparing polyclonal antibodies are known to the skilled artisan. Polyclonal antibodies can be raised in a mammal, for example, by one or more injections of an immunizing agent and, if desired, an adjuvant. Typically, the immunizing agent and/or adjuvant will be injected in the mammal by multiple subcutaneous or intraperitoneal injections. The immunizing agent may include a protein encoded by a nucleic acid of the figures or fragment thereof or a fusion protein thereof. It may be useful to conjugate the immunizing agent to a protein known to be immunogenic in the mammal being immunized. Examples of such immunogenic proteins include but are not limited to keyhole limpet hemocyanin, serum albumin, bovine thyroglobulin, and soybean trypsin inhibitor. Examples of adjuvants that may be employed include Freund's complete adjuvant and MPL-TDM adjuvant (monophosphoryl Lipid A, synthetic trehalose dicorynomycolate). The immunization protocol may be selected by one skilled in the art without undue experimentation.

[0153] The antibodies may, alternatively, be monoclonal antibodies. Monoclonal antibodies may be prepared using hybridoma methods, such as those described by Kohler and Milstein, Nature, 256:495 (1975). In a hybridoma method, a mouse, hamster, or other appropriate host animal, is typically immunized with an immunizing agent to elicit lymphocytes that produce or are capable of producing antibodies that will specifically bind to the immunizing agent. Alternatively, the lymphocytes may be immunized in vitro. The immunizing agent will typically include a polypeptide encoded by a nucleic acid of Tables 1-16, or fragment thereof or a fusion protein thereof. Generally, either peripheral blood lymphocytes (“PBLs”) are used if cells of human origin are desired, or spleen cells or lymph node cells are used if non-human mammalian sources are desired. The lymphocytes are then fused with an immortalized cell line using a suitable fusing agent, such as polyethylene glycol, to form a hybridoma cell (Goding, Monoclonal Antibodies: Principles and Practice, Academic Press, (1986) pp. 59-103). Immortalized cell lines are usually transformed mammalian cells, particularly myeloma cells of rodent, bovine and human origin. Usually, rat or mouse myeloma cell lines are employed. The hybridoma cells may be cultured in a suitable culture medium that preferably contains one or more substances that inhibit the growth or survival of the unfused, immortalized cells. For example, if the parental cells lack the enzyme hypoxanthine guanine phosphoribosyl transferase (HGPRT or HPRT), the culture medium for the hybridomas typically will include hypoxanthine, aminopterin, and thymidine (“HAT medium”), which substances prevent the growth of HGPRT-deficient cells.

[0154] Monoclonal antibody technology is used in implementing research, diagnosis and therapy. Monoclonal antibodies are used in radioimmunoassays, enzyme-linked immunosorbent assays, immunocytopathology, and flow cytometry for in vitro diagnosis, and in vivo for diagnosis and immunotherapy of human disease. Waldmann, T. A. (1991) Science 252:1657-1662. In particular, monoclonal antibodies have been widely applied to the diagnosis and therapy of cancer, wherein it is desirable to target malignant lesions while avoiding normal tissue. See, e.g., U.S. Pat. Nos. 4,753,894 to Frankel, et al.; 4,938,948 to Ring et al.; and 4,956,453 to Bjorn et al.

[0155] In one embodiment, the antibodies are bispecific antibodies. Bispecific antibodies are monoclonal, preferably human or humanized, antibodies that have binding specificities for at least two different antigens. A number of “humanized” antibody molecules comprising an antigen-binding site derived from a non-human immunoglobulin have been described, including chimeric antibodies having rodent V regions and their associated CDRs fused to human constant domains (Winter et al. (1991) Nature 349:293-299; Lobuglio et al. (1989) Proc. Nat. Acad. Sci. USA 86:4220-4224; Shaw et al. (1987) J Immunol. 138:4534-4538; and Brown et al. (1987) Cancer Res. 47:3577-3583), rodent CDRs grafted into a human supporting FR prior to fusion with an appropriate human antibody constant domain (Riechmann et al. (1988) Nature 332:323-327; Verhoeyen et al. (1988) Science 239:1534-1536; and Jones et al. (1986) Nature 321:522-525), and rodent CDRs supported by recombinantly veneered rodent FRs (European Patent Publication No. 519,596, published Dec. 23, 1992). These “humanized” molecules are designed to minimize unwanted immunological response toward rodent antihuman antibody molecules which limits the duration and effectiveness of therapeutic applications of those moieties in human recipients. In the present case, one of the binding specificities is for a protein encoded by a nucleic acid of Tables 1-16, or a fragment thereof, the other one is for any other antigen, and preferably for a cell-surface protein or receptor or receptor subunit, preferably one that is tumor specific.

[0156] In a preferred embodiment, the antibodies to CA are capable of reducing or eliminating the biological function of CA, as is described below. That is, the addition of anti-CA antibodies (either polyclonal or preferably monoclonal) to CA (or cells containing CA) may reduce or eliminate the CA activity. Generally, at least a 25% decrease in activity is preferred, with at least about 50% being particularly preferred and about a 95-100% decrease being especially preferred.

[0157] In a preferred embodiment the antibodies to the CA proteins are humanized antibodies. “Humanized” antibodies refer to a molecule having an antigen binding site that is substantially derived from an immunoglobulin from a non-human species and the remaining immunoglobulin structure of the molecule based upon the structure and/or sequence of a human immunoglobulin. The antigen binding site may comprise either complete variable domains fused onto constant domains or only the complementarity determining regions (CDRs) grafted onto appropriate framework regions in the variable domains. Antigen binding sites may be wild type or modified by one or more amino acid substitutions, e.g., modified to resemble human immunoglobulin more closely. Alternatively, a humanized antibody may be derived from a chimeric antibody that retains or substantially retains the antigen-binding properties of the parental, non-human, antibody but which exhibits diminished immunogenicity as compared to the parental antibody when administered to humans. The phrase “chimeric antibody,” as used herein, refers to an antibody containing sequence derived from two different antibodies (see, e.g., U.S. Pat. No. 4,816,567) that typically originate from different species. Typically, in these chimeric antibodies, the variable region of both light and heavy chains mimics the variable regions of antibodies derived from one species of mammals, while the constant portions are homologous to the sequences in antibodies derived from another. Most typically, chimeric antibodies comprise human and murine antibody fragments, generally human constant and mouse variable regions. Humanized antibodies include human immunoglobulins (recipient antibody) in which residues form a complementary determining region (CDR) of the recipient are replaced by residues from a CDR of a non-human species (donor antibody) such as mouse, rat or rabbit having the desired specificity, affinity and capacity. In some instances, Fv framework residues of the human immunoglobulin are replaced by corresponding non-human residues. Humanized antibodies may also comprise residues that are found neither in the recipient antibody nor in the imported CDR or framework sequences. In general, the humanized antibody will comprise substantially all of at least one, and typically two, variable domains, in which all or substantially all of the CDR regions correspond to those of a non-human immunoglobulin and all or substantially all of the framework residues (FR) regions are those of a human immunoglobulin consensus sequence. The humanized antibody optimally also will comprise at least a portion of an immunoglobulin constant region (Fc), typically that of a human immunoglobulin (Jones et al., Nature, 321:522-525 (1986); Riechmann et al., Nature, 332:323-329 (1988); and Presta, Curr. Op. Struct. Biol., 2:593-596 (1992)). One clear advantage to such chimeric forms is that, for example, the variable regions can conveniently be derived from presently known sources using readily available hybridomas or B cells from non human host organisms in combination with constant regions derived from, for example, human cell preparations. While the variable region has the advantage of ease of preparation, and the specificity is not affected by its source, the constant region being human, is less likely to elicit an immune response from a human subject when the antibodies are injected than would the constant region from a non-human source. However, the definition is not limited to this particular example.

[0158] Because humanized antibodies are far less immunogenic in humans than the parental mouse monoclonal antibodies, they can be used for the treatment of humans with far less risk of anaphylaxis. Thus, these antibodies may be preferred in therapeutic applications that involve in vivo administration to a human such as, e.g., use as radiation sensitizers for the treatment of neoplastic disease or use in methods to reduce the side effects of, e.g., cancer therapy. Methods for humanizing non-human antibodies are well known in the art. Generally, a humanized antibody has one or more amino acid residues introduced into it from a source that is non-human. These non-human amino acid residues are often referred to as import residues, which are typically taken from an import variable domain. Humanization can be essentially performed following the method of Winter and co-workers (Jones et al., Nature 321:522-525 (1986); Riechmann et al., Nature 332:323-327 (1988); Verhoeyen et al., Science 239:1534-1536 (1988)), by substituting rodent CDRs or CDR sequences for the corresponding sequences of a human antibody. Accordingly, such humanized antibodies are chimeric antibodies (U.S. Pat. No. 4,816,567), wherein substantially less than an intact human variable domain has been substituted by the corresponding sequence from a non-human species. In practice, humanized antibodies are typically human antibodies in which some CDR residues and possibly some FR residues are substituted by residues from analogous sites in rodent antibodies.

[0159] Human antibodies can also be produced using various techniques known in the art, including phage display libraries [Hoogenboom and Winter, J. Mol. Biol., 227:381 (1991); Marks et al., J. Mol. Biol., 222:581 (1991)]. The techniques of Cole et al. and Boerner et al. are also available for the preparation of human monoclonal antibodies [Cole et al., Monoclonal Antibodies and Cancer Therapy, Alan R. Liss, p. 77 (1985) and Boerner et al., J. Immunol., 147(1):86-95 (1991)]. Humanized antibodies may be achieved by a variety of methods including, for example: (1) grafting the non-human complementarity determining regions (CDRs) onto a human framework and constant region (a process referred to in the art as “humanizing”), or, alternatively, (2) transplanting the entire non-human variable domains, but “cloaking” them with a human-like surface by replacement of surface residues (a process referred to in the art as “veneering”). In the present invention, humanized antibodies will include both “humanized” and “veneered” antibodies. Similarly, human antibodies can be made by introducing human immunoglobulin loci into transgenic animals, e.g., mice in which the endogenous immunoglobulin genes have been partially or completely inactivated. Upon challenge, human antibody production is observed, which closely resembles that seen in humans in all respects, including gene rearrangement, assembly, and antibody repertoire. This approach is described, for example, in U.S. Pat. Nos. 5,545,807; 5,545,806; 5,569,825; 5,625,126; 5,633,425; 5,661,016, and in the following scientific publications: Marks et al., Bio/Technology 10, 779-783 (1992); Lonberg et al., Nature 368 856-859 (1994); Morrison, Nature 368, 812-13 (1994); Fishwild et al., Nature Biotechnology 14, 845-51 (1996); Neuberger, Nature Biotechnology 14, 826 (1996); Lonberg and Huszar, Intern. Rev. Immunol. 13 65-93 (1995); Jones et al., Nature 321:522-525 (1986); Morrison et al., Proc. Natl. Acad. Sci, U.S.A., 81:6851-6855 (1984); Morrison and Oi, Adv. Immunol., 44:65-92 (1988); Verhoeyer et al., Science 239:1534-1536 (1988); Padlan, Molec. Immun. 28:489-498 (1991); Padlan, Molec. Immunol. 31(3):169-217 (1994); and Kettleborough, C. A. et al., Protein Eng. 4(7):773-83 (1991) each of which is incorporated herein by reference.

[0160] The phrase “complementarity determining region” refers to amino acid sequences which together define the binding affinity and specificity of the natural Fv region of a native immunoglobulin binding site. See, e.g., Chothia et al., J. Mol. Biol. 196:901-917 (1987); Kabat et al., U.S. Dept. of Health and Human Services NIH Publication No. 91-3242 (1991). The phrase “constant region” refers to the portion of the antibody molecule that confers effector functions. In the present invention, mouse constant regions are substituted by human constant regions. The constant regions of the subject humanized antibodies are derived from human immunoglobulins. The heavy chain constant region can be selected from any of the five isotypes: alpha, delta, epsilon, gamma or mu. One method of humanizing antibodies comprises aligning the non-human heavy and light chain sequences to human heavy and light chain sequences, selecting and replacing the non-human framework with a human framework based on such alignment, molecular modeling to predict the conformation of the humanized sequence and comparing to the conformation of the parent antibody. This process is followed by repeated back mutation of residues in the CDR region that disturb the structure of the CDRs until the predicted conformation of the humanized sequence model closely approximates the conformation of the non-human CDRs of the parent non-human antibody. Such humanized antibodies may be further derivatized to facilitate uptake and clearance, e.g, via Ashwell receptors. See, e.g., U.S. Pat. Nos. 5,530,101 and 5,585,089 which are incorporated herein by reference.

[0161] Humanized antibodies to CA polypeptides can also be produced using transgenic animals that are engineered to contain human immunoglobulin loci. For example, WO 98/24893 discloses transgenic animals having a human Ig locus wherein the animals do not produce functional endogenous immunoglobulins due to the inactivation of endogenous heavy and light chain loci. WO 91/10741 also discloses transgenic non-primate mammalian hosts capable of mounting an immune response to an immunogen, wherein the antibodies have primate constant and/or variable regions, and wherein the endogenous immunoglobulin-encoding loci are substituted or inactivated. WO 96/30498 discloses the use of the Cre/Lox system to modify the immunoglobulin locus in a mammal, such as to replace all or a portion of the constant or variable region to form a modified antibody molecule. WO 94/02602 discloses non-human mammalian hosts having inactivated endogenous Ig loci and functional human Ig loci. U.S. Pat. No. 5,939,598 discloses methods of making transgenic mice in which the mice lack endogenous heavy chains, and express an exogenous immunoglobulin locus comprising one or more xenogeneic constant regions.

[0162] Using a transgenic animal described above, an immune response can be produced to a selected antigenic molecule, and antibody-producing cells can be removed from the animal and used to produce hybridomas that secrete human monoclonal antibodies. Immunization protocols, adjuvants, and the like are known in the art, and are used in immunization of, for example, a transgenic mouse as described in WO 96/33735. The monoclonal antibodies can be tested for the ability to inhibit or neutralize the biological activity or physiological effect of the corresponding protein.

[0163] In the present invention, CA polypeptides of the invention and variants thereof are used to immunize a transgenic animal as described above. Monoclonal antibodies are made using methods known in the art, and the specificity of the antibodies is tested using isolated CA polypeptides. Methods for preparation of the human or primate CA or an epitope thereof include, but are not limited to chemical synthesis, recombinant DNA techniques or isolation from biological samples. Chemical synthesis of a peptide can be performed, for example, by the classical Merrifeld method of solid phase peptide synthesis (Merrifeld, J. Am. Chem. Soc. 85:2149, 1963 which is incorporated by reference) or the FMOC strategy on a Rapid Automated Multiple Peptide Synthesis system (E.I. du Pont de Nemours Company, Wilmington, Del.) (Caprino and Han, J. Org Chem. 37:3404, 1972 which is incorporated by reference).

[0164] Polyclonal antibodies can be prepared by immunizing rabbits or other animals by injecting antigen followed by subsequent boosts at appropriate intervals. The animals are bled and sera assayed against purified CA proteins usually by ELISA or by bioassay based upon the ability to block the action of CA proteins. When using avian species, e.g., chicken, turkey and the like, the antibody can be isolated from the yolk of the egg. Monoclonal antibodies can be prepared after the method of Milstein and Kohler by fusing splenocytes from immunized mice with continuously replicating tumor cells such as myeloma or lymphoma cells. (Milstein and Kohler, Nature 256:495-497, 1975; Gulfre and Milstein, Methods in Enzymology: Immunochemical Techniques 73:1-46, Langone and Banatis eds., Academic Press, 1981 which are incorporated by reference). The hybridoma cells so formed are then cloned by limiting dilution methods and supernates assayed for antibody production by ELISA, RIA or bioassay.

[0165] The unique ability of antibodies to recognize and specifically bind to target proteins provides an approach for treating an overexpression of the protein. Thus, another aspect of the present invention provides for a method for preventing or treating diseases involving overexpression of a CA polypeptide by treatment of a patient with specific antibodies to the CA protein.

[0166] Specific antibodies, either polyclonal or monoclonal, to the CA proteins can be produced by any suitable method known in the art as discussed above. For example, murine or human monoclonal antibodies can be produced by hybridoma technology or, alternatively, the CA proteins, or an immunologically active fragment thereof, or an anti-idiotypic antibody, or fragment thereof can be administered to an animal to elicit the production of antibodies capable of recognizing and binding to the CA proteins. Such antibodies can be from any class of antibodies including, but not limited to IgG, IgA, IgM, IgD, and IgE or in the case of avian species, IgY and from any subclass of antibodies.

[0167] By immunotherapy is meant treatment of a cancer with an antibody raised against a CA protein. As used herein, immunotherapy can be passive or active. Passive immunotherapy as defined herein is the passive transfer of antibody to a recipient (patient). Active immunization is the induction of antibody and/or T-cell responses in a recipient (patient). Induction of an immune response is the result of providing the recipient with an antigen to which antibodies are raised. As appreciated by one of ordinary skill in the art, the antigen may be provided by injecting a polypeptide against which antibodies are desired to be raised into a recipient, or contacting the recipient with a nucleic acid capable of expressing the antigen and under conditions for expression of the antigen.

[0168] In a preferred embodiment, oncogenes which encode secreted growth factors may be inhibited by raising antibodies against CA proteins that are secreted proteins as described above. Without being bound by theory, antibodies used for treatment, bind and prevent the secreted protein from binding to its receptor, thereby inactivating the secreted CA protein.

[0169] In another preferred embodiment, the CA protein to which antibodies are raised is a transmembrane protein. Without being bound by theory, antibodies used for treatment, bind the extracellular domain of the CA protein and prevent it from binding to other proteins, such as circulating ligands or cell-associated molecules. The antibody may cause down-regulation of the transmembrane CA protein. As will be appreciated by one of ordinary skill in the art, the antibody may be a competitive, non-competitive or uncompetitive inhibitor of protein binding to the extracellular domain of the CA protein. The antibody is also an antagonist of the CA protein. Further, the antibody prevents activation of the transmembrane CA protein. In one aspect, when the antibody prevents the binding of other molecules to the CA protein, the antibody prevents growth of the cell. The antibody may also sensitize the cell to cytotoxic agents, including, but not limited to TNF-α, TNF-β, IL-1, INF-γ and IL-2, or chemotherapeutic agents including 5FU, vinblastine, actinomycin D, cisplatin, methotrexate, and the like. In some instances the antibody belongs to a sub-type that activates serum complement when complexed with the transmembrane protein thereby mediating cytotoxicity. Thus, cancers may be treated by administering to a patient antibodies directed against the transmembrane CA protein.

[0170] In another preferred embodiment, the antibody is conjugated to a therapeutic moiety. In one aspect the therapeutic moiety is a small molecule that modulates the activity of the CA protein. In another aspect the therapeutic moiety modulates the activity of molecules associated with or in close proximity to the CA protein. The therapeutic moiety may inhibit enzymatic activity such as protease or protein kinase activity associated with cancer.

[0171] In a preferred embodiment, the therapeutic moiety may also be a cytotoxic agent. In this method, radioisotopes, natural toxins, chemotherapy agents, or other substances (such as biological response modifiers) are chemically linked or conjugated to a monoclonal antibody to form “immunoconjugates” and “immunotoxins” which target the cytotoxic agent to tumor tissue or cells resulting in a reduction in the number of afflicted cells, thereby reducing symptoms associated with cancers, including lymphoma. Cytotoxic agents are numerous and varied and include, but are not limited to, cytotoxic drugs or toxins or active fragments of such toxins. Suitable toxins and their corresponding fragments include diphtheria A chain, exotoxin A chain, ricin A chain, abrin A chain, curcin, crotin, phenomycin, enomycin and the like. Cytotoxic agents also include radiochemicals made by conjugating radioisotopes to antibodies raised against CA proteins, or binding of a radionuclide to a chelating agent that has been covalently attached to the antibody. Targeting the therapeutic moiety to transmembrane CA proteins not only serves to increase the local concentration of therapeutic moiety in the cancer of interest, i.e., lymphoma, but also serves to reduce deleterious side effects that may be associated with the therapeutic moiety. A number of investigators have used monoclonal antibodies as carriers of cytotoxic substances in attempts to selectively direct those agents to malignant tissue. More particularly, a number of monoclonal antibodies have been conjugated to toxins such as ricin, abrin, diphtheria toxin and Pseudomonas exotoxin or to enzymatically active portions (A chains) thereof via heterobifunctional agents. See, e.g., U.S. Pat. No. 4,753,894 to Frankel et al.; Nevelle, et al. (1982) Immunol Rev 62:75-91; Ross et al. (1980) Eur. J. Biochem 104; Vitteta et al. (1982) Immunol Rev 62:158-183; Raso et al. (1982) Cancer Res 42:457-464, and Trowbridge et al. (1981) Nature 294:171-173.

[0172] In another preferred embodiment, the CA protein against which the antibodies are raised is an intracellular protein. In this case, the antibody may be conjugated to a protein that facilitates entry into the cell. In one case, the antibody enters the cell by endocytosis. In another embodiment, a nucleic acid encoding the antibody is administered to the individual or cell. Moreover, wherein the CA protein can be targeted within a cell, e.g., the nucleus, an antibody thereto contains a signal for that target localization, e.g., a nuclear localization signal.

[0173] The CA antibodies of the invention specifically bind to CA proteins. By “specifically bind” herein is meant that the antibodies bind to the protein with a binding constant in the range of 10⁻⁴-10⁻⁶ M⁻¹, with a preferred range being 10⁻⁷-10⁻⁹ M⁻⁴.

[0174] In a preferred embodiment, the CA protein is purified or isolated after expression. CA proteins may be isolated or purified in a variety of ways known to those skilled in the art depending on what other components are present in the sample. Standard purification methods include electrophoretic, molecular, immunological and chromatographic techniques, including ion exchange, hydrophobic, affinity, and reverse-phase HPLC chromatography, and chromatofocusing. For example, the CA protein may be purified using a standard anti-CA antibody column. Ultrafiltration and diafiltration techniques, in conjunction with protein concentration, are also useful. For general guidance in suitable purification techniques, see Scopes, R., Protein Purification, Springer-Verlag, NY (1982). The degree of purification necessary will vary depending on the use of the CA protein. In some instances no purification will be necessary.

### Detection of Cancer Phenotype

[0175] Once expressed and purified if necessary, the CA proteins and nucleic acids are useful in a number of applications. In one aspect, the expression levels of genes are determined for different cellular states in the cancer phenotype; that is, the expression levels of genes in normal tissue and in cancer tissue (and in some cases, for varying severities of lymphoma that relate to prognosis, as outlined below) are evaluated to provide expression profiles. An expression profile of a particular cell state or point of development is essentially a “fingerprint” of the state; while two states may have any particular gene similarly expressed, the evaluation of a number of genes simultaneously allows the generation of a gene expression profile that is unique to the state of the cell. By comparing expression profiles of cells in different states, information regarding which genes are important (including both up- and down-regulation of genes) in each of these states is obtained. Then, diagnosis may be done or confirmed: does tissue from a particular patient have the gene expression profile of normal or cancer tissue.

[0176] “Differential expression,” or equivalents used herein, refers to both qualitative as well as quantitative differences in the temporal and/or cellular expression patterns of genes, within and among the cells. Thus, a differentially expressed gene can qualitatively have its expression altered, including an activation or inactivation, in, for example, normal versus cancer tissue. That is, genes may be turned on or turned off in a particular state, relative to another state. As is apparent to the skilled artisan, any comparison of two or more states can be made. Such a qualitatively regulated gene will exhibit an expression pattern within a state or cell type which is detectable by standard techniques in one such state or cell type, but is not detectable in both. Alternatively, the determination is quantitative in that expression is increased or decreased; that is, the expression of the gene is either up-regulated, resulting in an increased amount of transcript, or down-regulated, resulting in a decreased amount of transcript. The degree to which expression differs need only be large enough to quantify via standard characterization techniques as outlined below, such as by use of Affymetrix GeneChip® expression arrays, Lockhart, Nature Biotechnology, 14:1675-1680 (1996), hereby expressly incorporated by reference. Other techniques include, but are not limited to, quantitative reverse transcriptase PCR, Northern analysis and RNase protection. As outlined above, preferably the change in expression (i.e. upregulation or downregulation) is at least about 50%, more preferably at least about 100%, more preferably at least about 150%, more preferably, at least about 200%, with from 300 to at least 1000% being especially preferred.

[0177] As will be appreciated by those in the art, this may be done by evaluation at either the gene transcript, or the protein level; that is, the amount of gene expression may be monitored using nucleic acid probes to the DNA or RNA equivalent of the gene transcript, and the quantification of gene expression levels, or, alternatively, the final gene product itself (protein) can be monitored, for example through the use of antibodies to the CA protein and standard immunoassays (ELISAs, etc.) or other techniques, including mass spectroscopy assays, 2D gel electrophoresis assays, etc. Thus, the proteins corresponding to CA genes, i.e. those identified as being important in a particular cancer phenotype, i.e., lymphoma, can be evaluated in a diagnostic test specific for that cancer.

[0178] In a preferred embodiment, gene expression monitoring is done and a number of genes, i.e. an expression profile, is monitored simultaneously, although multiple protein expression monitoring can be done as well. Similarly, these assays may be done on an individual basis as well.

[0179] In this embodiment, the CA nucleic acid probes may be attached to biochips as outlined herein for the detection and quantification of CA sequences in a particular cell. The assays are done as is known in the art. As will be appreciated by those in the art, any number of different CA sequences may be used as probes, with single sequence assays being used in some cases, and a plurality of the sequences described herein being used in other embodiments. In addition, while solid-phase assays are described, any number of solution based assays may be done as well.

[0180] In a preferred embodiment, both solid and solution based assays may be used to detect CA sequences that are up-regulated or down-regulated in cancers as compared to normal tissue. In instances where the CA sequence has been altered but shows the same expression profile or an altered expression profile, the protein will be detected as outlined herein.

[0181] In a preferred embodiment nucleic acids encoding the CA protein are detected. Although DNA or RNA encoding the CA protein may be detected, of particular interest are methods wherein the mRNA encoding a CA protein is detected. The presence of mRNA in a sample is an indication that the CA gene has been transcribed to form the mRNA, and suggests that the protein is expressed. Probes to detect the mRNA can be any nucleotide/deoxynucleotide probe that is complementary to and base pairs with the mRNA and includes but is not limited to oligonucleotides, cDNA or RNA. Probes also should contain a detectable label, as defined herein. In one method the mRNA is detected after immobilizing the nucleic acid to be examined on a solid support such as nylon membranes and hybridizing the probe with the sample. Following washing to remove the non-specifically bound probe, the label is detected. In another method detection of the mRNA is performed in situ. In this method permeabilized cells or tissue samples are contacted with a detectably labeled nucleic acid probe for sufficient time to allow the probe to hybridize with the target mRNA. Following washing to remove the non-specifically bound probe, the label is detected. For example a digoxygenin labeled riboprobe (RNA probe) that is complementary to the mRNA encoding a CA protein is detected by binding the digoxygenin with an anti-digoxygenin secondary antibody and developed with nitro blue tetrazolium and 5-bromo-4-chloro-3-indoyl phosphate.

[0182] In a preferred embodiment, any of the three classes of proteins as described herein (secreted, transmembrane or intracellular proteins) are used in diagnostic assays. The CA proteins, antibodies, nucleic acids, modified proteins and cells containing CA sequences are used in diagnostic assays. This can be done on an individual gene or corresponding polypeptide level, or as sets of assays.

[0183] As described and defined herein, CA proteins find use as markers of cancers, including lymphomas such as, but not limited to, Hodgkin's and non-Hodgkin's lymphoma. Detection of these proteins in putative cancer tissue or patients allows for a determination or diagnosis of the type of cancer. Numerous methods known to those of ordinary skill in the art find use in detecting cancers. In one embodiment, antibodies are used to detect CA proteins. A preferred method separates proteins from a sample or patient by electrophoresis on a gel (typically a denaturing and reducing protein gel, but may be any other type of gel including isoelectric focusing gels and the like). Following separation of proteins, the CA protein is detected by immunoblotting with antibodies raised against the CA protein. Methods of immunoblotting are well known to those of ordinary skill in the art.

[0184] In another preferred method, antibodies to the CA protein find use in in situ imaging techniques. In this method cells are contacted with from one to many antibodies to the CA protein(s). Following washing to remove non-specific antibody binding, the presence of the antibody or antibodies is detected. In one embodiment the antibody is detected by incubating with a secondary antibody that contains a detectable label. In another method the primary antibody to the CA protein(s) contains a detectable label. In another preferred embodiment each one of multiple primary antibodies contains a distinct and detectable label. This method finds particular use in simultaneous screening for a plurality of CA proteins. As will be appreciated by one of ordinary skill in the art, numerous other histological imaging techniques are useful in the invention.

[0185] In a preferred embodiment the label is detected in a fluorometer that has the ability to detect and distinguish emissions of different wavelengths. In addition, a fluorescence activated cell sorter (FACS) can be used in the method.

[0186] In another preferred embodiment, antibodies find use in diagnosing cancers from blood samples. As previously described, certain CA proteins are secreted/circulating molecules. Blood samples, therefore, are useful as samples to be probed or tested for the presence of secreted CA proteins. Antibodies can be used to detect the CA proteins by any of the previously described immunoassay techniques including ELISA, immunoblotting (Western blotting), immunoprecipitation, BIACORE technology and the like, as will be appreciated by one of ordinary skill in the art.

[0187] In a preferred embodiment, in situ hybridization of labeled CA nucleic acid probes to tissue arrays is done. For example, arrays of tissue samples, including CA tissue and/or normal tissue, are made. In situ hybridization as is known in the art can then be done.

[0188] It is understood that when comparing the expression fingerprints between an individual and a standard, the skilled artisan can make a diagnosis as well as a prognosis. It is further understood that the genes that indicate diagnosis may differ from those that indicate prognosis.

[0189] In a preferred embodiment, the CA proteins, antibodies, nucleic acids, modified proteins and cells containing CA sequences are used in prognosis assays. As above, gene expression profiles can be generated that correlate to cancer, especially lymphoma, severity, in terms of long term prognosis. Again, this may be done on either a protein or gene level, with the use of genes being preferred. As above, the CA probes are attached to biochips for the detection and quantification of CA sequences in a tissue or patient. The assays proceed as outlined for diagnosis.

### Screening for CA-Targeted Drugs

[0190] In one embodiment, any of the CA sequences as described herein are used in drug screening assays. The CA proteins, antibodies, nucleic acids, modified proteins and cells containing CA sequences are used in drug screening assays or by evaluating the effect of drug candidates on a “gene expression profile” or expression profile of polypeptides. In one embodiment, the expression profiles are used, preferably in conjunction with high throughput screening techniques to allow monitoring for expression profile genes after treatment with a candidate agent, Zlokarnik, et al., Science 279, 84-8 (1998), Heid, et al., Genome Res., 6:986-994 (1996).

[0191] In another embodiment, the CA proteins, antibodies, nucleic acids, modified proteins and cells containing the native or modified CA proteins are used in screening assays. That is, the present invention provides novel methods for screening for compositions that modulate the cancer phenotype. As above, this can be done by screening for modulators of gene expression or for modulators of protein activity. Similarly, this may be done on an individual gene or protein level or by evaluating the effect of drug candidates on a “gene expression profile”. In a preferred embodiment, the expression profiles are used, preferably in conjunction with high throughput screening techniques to allow monitoring for expression profile genes after treatment with a candidate agent, see Zlokarnik, supra.

[0192] Having identified the CA genes herein, a variety of assays to evaluate the effects of agents on gene expression may be executed. In a preferred embodiment, assays may be run on an individual gene or protein level. That is, having identified a particular gene as aberrantly regulated in cancer, candidate bioactive agents may be screened to modulate the gene's regulation. “Modulation” thus includes both an increase and a decrease in gene expression or activity. The preferred amount of modulation will depend on the original change of the gene expression in normal versus tumor tissue, with changes of at least 10%, preferably 50%, more preferably 100-300%, and in some embodiments 300-1000% or greater. Thus, if a gene exhibits a 4 fold increase in tumor compared to normal tissue, a decrease of about four fold is desired; a 10 fold decrease in tumor compared to normal tissue gives a 10 fold increase in expression for a candidate agent is desired, etc. Alternatively, where the CA sequence has been altered but shows the same expression profile or an altered expression profile, the protein will be detected as outlined herein.

[0193] As will be appreciated by those in the art, this may be done by evaluation at either the gene or the protein level; that is, the amount of gene expression may be monitored using nucleic acid probes and the quantification of gene expression levels, or, alternatively, the level of the gene product itself can be monitored, for example through the use of antibodies to the CA protein and standard immunoassays. Alternatively, binding and bioactivity assays with the protein may be done as outlined below.

[0194] In a preferred embodiment, gene expression monitoring is done and a number of genes, i.e. an expression profile, is monitored simultaneously, although multiple protein expression monitoring can be done as well.

[0195] In this embodiment, the CA nucleic acid probes are attached to biochips as outlined herein for the detection and quantification of CA sequences in a particular cell. The assays are further described below.

[0196] Generally, in a preferred embodiment, a candidate bioactive agent is added to the cells prior to analysis. Moreover, screens are provided to identify a candidate bioactive agent that modulates a particular type of cancer, modulates CA proteins, binds to a CA protein, or interferes between the binding of a CA protein and an antibody.

[0197] The term “candidate bioactive agent” or “drug candidate” or grammatical equivalents as used herein describes any molecule, e.g., protein, oligopeptide, small organic or inorganic molecule, polysaccharide, polynucleotide, etc., to be tested for bioactive agents that are capable of directly or indirectly altering either the cancer phenotype, binding to and/or modulating the bioactivity of a CA protein, or the expression of a CA sequence, including both nucleic acid sequences and protein sequences. In a particularly preferred embodiment, the candidate agent suppresses a CA phenotype, for example to a normal tissue fingerprint. Similarly, the candidate agent preferably suppresses a severe CA phenotype. Generally a plurality of assay mixtures are run in parallel with different agent concentrations to obtain a differential response to the various concentrations. Typically, one of these concentrations serves as a negative control, i.e., at zero concentration or below the level of detection.

[0198] In one aspect, a candidate agent will neutralize the effect of a CA protein. By “neutralize” is meant that activity of a protein is either inhibited or counter acted against so as to have substantially no effect on a cell.

[0199] Candidate agents encompass numerous chemical classes, though typically they are organic or inorganic molecules, preferably small organic compounds having a molecular weight of more than 100 and less than about 2,500 Daltons. Preferred small molecules are less than 2000, or less than 1500 or less than 1000 or less than 500 D. Candidate agents comprise functional groups necessary for structural interaction with proteins, particularly hydrogen bonding, and typically include at least an amine, carbonyl, hydroxyl or carboxyl group, preferably at least two of the functional chemical groups. The candidate agents often comprise cyclical carbon or heterocyclic structures and/or aromatic or polyaromatic structures substituted with one or more of the above functional groups. Candidate agents are also found among biomolecules including peptides, saccharides, fatty acids, steroids, purines, pyrimidines, derivatives, structural analogs or combinations thereof. Particularly preferred are peptides.

[0200] Candidate agents are obtained from a wide variety of sources including libraries of synthetic or natural compounds. For example, numerous means are available for random and directed synthesis of a wide variety of organic compounds and biomolecules, including expression of randomized oligonucleotides. Alternatively, libraries of natural compounds in the form of bacterial, fungal, plant and animal extracts are available or readily produced. Additionally, natural or synthetically produced libraries and compounds are readily modified through conventional chemical, physical and biochemical means. Known pharmacological agents may be subjected to directed or random chemical modifications, such as acylation, alkylation, esterification, or amidification to produce structural analogs.

[0201] In one embodiment, the candidate bioactive agents are proteins. By “protein” herein is meant at least two covalently attached amino acids, which includes proteins, polypeptides, oligopeptides and peptides. The protein may be made up of naturally occurring amino acids and peptide bonds, or synthetic peptidomimetic structures. Thus “amino acid”, or “peptide residue”, as used herein means both naturally occurring and synthetic amino acids. For example, homo-phenylalanine, citrulline and norleucine are considered amino acids for the purposes of the invention. “Amino acid” also includes imino acid residues such as proline and hydroxyproline. The side chains may be in either the (R) or the (S) configuration. In the preferred embodiment, the amino acids are in the (S) or L-configuration. If non-naturally occurring side chains are used, non-amino acid substituents may be used, for example to prevent or retard in vivo degradations.

[0202] In a preferred embodiment, the candidate bioactive agents are naturally occurring proteins or fragments of naturally occurring proteins. Thus, for example, cellular extracts containing proteins, or random or directed digests of proteinaceous cellular extracts, may be used. In this way libraries of prokaryotic and eukaryotic proteins may be made for screening in the methods of the invention. Particularly preferred in this embodiment are libraries of bacterial, fungal, viral, and mammalian proteins, with the latter being preferred, and human proteins being especially preferred.

[0203] In another preferred embodiment, the candidate bioactive agents are peptides of from about 5 to about 30 amino acids, with from about 5 to about 20 amino acids being preferred, and from about 7 to about 15 being particularly preferred. The peptides may be digests of naturally occurring proteins as is outlined above, random peptides, or “biased” random peptides. By “randomized” or grammatical equivalents herein is meant that each nucleic acid and peptide consists of essentially random nucleotides and amino acids, respectively. Since generally these random peptides (or nucleic acids, discussed below) are chemically synthesized, they may incorporate any nucleotide or amino acid at any position. The synthetic process can be designed to generate randomized proteins or nucleic acids, to allow the formation of all or most of the possible combinations over the length of the sequence, thus forming a library of randomized candidate bioactive proteinaceous agents.

[0204] In one embodiment, the library is fully randomized, with no sequence preferences or constants at any position. In a preferred embodiment, the library is biased. That is, some positions within the sequence are either held constant, or are selected from a limited number of possibilities. For example, in a preferred embodiment, the nucleotides or amino acid residues are randomized within a defined class, for example, of hydrophobic amino acids, hydrophilic residues, sterically biased (either small or large) residues, towards the creation of nucleic acid binding domains, the creation of cysteines, for cross-linking, prolines for SH-3 domains, serines, threonines, tyrosines or histidines for phosphorylation sites, etc., or to purines, etc.

[0205] In one embodiment, the candidate bioactive agents are nucleic acids. As described generally for proteins, nucleic acid candidate bioactive agents may be naturally occurring nucleic acids, random nucleic acids, or “biased” random nucleic acids. In another embodiment, the candidate bioactive agents are organic chemical moieties, a wide variety of which are available in the literature.

[0206] In assays for testing alteration of the expression profile of one or more CA genes, after the candidate agent has been added and the cells allowed to incubate for some period of time, a nucleic acid sample containing the target sequences to be analyzed is prepared. The target sequence is prepared using known techniques (e.g., converted from RNA to labeled cDNA, as described above) and added to a suitable microarray. For example, an in vitro reverse transcription with labels covalently attached to the nucleosides is performed. Generally, the nucleic acids are labeled with a label as defined herein, especially with biotin-FITC or PE, Cy3 and Cy5.

[0207] As will be appreciated by those in the art, these assays can be direct hybridization assays or can comprise “sandwich assays”, which include the use of multiple probes, as is generally outlined in U.S. Pat. Nos. 5,681,702, 5,597,909, 5,545,730, 5,594,117, 5,591,584, 5,571,670, 5,580,731, 5,571,670, 5,591,584, 5,624,802, 5,635,352, 5,594,118, 5,359,100, 5,124,246 and 5,681,697, all of which are hereby incorporated by reference. In this embodiment, in general, the target nucleic acid is prepared as outlined above, and then added to the biochip comprising a plurality of nucleic acid probes, under conditions that allow the formation of a hybridization complex.

[0208] A variety of hybridization conditions may be used in the present invention, including high, moderate and low stringency conditions as outlined above. The assays are generally run under stringency conditions that allow formation of the label probe hybridization complex only in the presence of target. Stringency can be controlled by altering a step parameter that is a thermodynamic variable, including, but not limited to, temperature, formamide concentration, salt concentration, chaotropic salt concentration, pH, organic solvent concentration, etc. These parameters may also be used to control non-specific binding, as is generally outlined in U.S. Pat. No. 5,681,697. Thus it may be desirable to perform certain steps at higher stringency conditions to reduce non-specific binding.

[0209] The reactions outlined herein may be accomplished in a variety of ways, as will be appreciated by those in the art. Components of the reaction may be added simultaneously, or sequentially, in any order, with preferred embodiments outlined below. In addition, the reaction may include a variety of other reagents in the assays. These include reagents like salts, buffers, neutral proteins, e.g. albumin, detergents, etc which may be used to facilitate optimal hybridization and detection, and/or reduce non-specific or background interactions. Also reagents that otherwise improve the efficiency of the assay, such as protease inhibitors, nuclease inhibitors, anti-microbial agents, etc., may be used, depending on the sample preparation methods and purity of the target. In addition, either solid phase or solution based (i.e., kinetic PCR) assays may be used.

[0210] Once the assay is run, the data are analyzed to determine the expression levels, and changes in expression levels as between states, of individual genes, forming a gene expression profile.

[0211] In a preferred embodiment, as for the diagnosis and prognosis applications, having identified the differentially expressed gene(s) or mutated gene(s) important in any one state, screens can be run to test for alteration of the expression of the CA genes individually. That is, screening for modulation of regulation of expression of a single gene can be done. Thus, for example, in the case of target genes whose presence or absence is unique between two states, screening is done for modulators of the target gene expression.

[0212] In addition, screens can be done for novel genes that are induced in response to a candidate agent. After identifying a candidate agent based upon its ability to suppress a CA expression pattern leading to a normal expression pattern, or modulate a single CA gene expression profile so as to mimic the expression of the gene from normal tissue, a screen as described above can be performed to identify genes that are specifically modulated in response to the agent. Comparing expression profiles between normal tissue and agent treated CA tissue reveals genes that are not expressed in normal tissue or CA tissue, but are expressed in agent treated tissue. These agent specific sequences can be identified and used by any of the methods described herein for CA genes or proteins. In particular these sequences and the proteins they encode find use in marking or identifying agent-treated cells. In addition, antibodies can be raised against the agent-induced proteins and used to target novel therapeutics to the treated CA tissue sample.

[0213] Thus, in one embodiment, a candidate agent is administered to a population of CA cells, that thus has an associated CA expression profile. By “administration” or “contacting” herein is meant that the candidate agent is added to the cells in such a manner as to allow the agent to act upon the cell, whether by uptake and intracellular action, or by action at the cell surface. In some embodiments, nucleic acid encoding a proteinaceous candidate agent (i.e. a peptide) may be put into a viral construct such as a retroviral construct and added to the cell, such that expression of the peptide agent is accomplished; see PCT US97/01019, hereby expressly incorporated by reference.

[0214] Once the candidate agent has been administered to the cells, the cells can be washed if desired and are allowed to incubate under preferably physiological conditions for some period of time. The cells are then harvested and a new gene expression profile is generated, as outlined herein.

[0215] Thus, for example, CA tissue may be screened for agents that reduce or suppress the CA phenotype. A change in at least one gene of the expression profile indicates that the agent has an effect on CA activity. By defining such a signature for the CA phenotype, screens for new drugs that alter the phenotype can be devised. With this approach, the drug target need not be known and need not be represented in the original expression screening platform, nor does the level of transcript for the target protein need to change.

[0216] In a preferred embodiment, as outlined above, screens may be done on individual genes and gene products (proteins). That is, having identified a particular differentially expressed gene as important in a particular state, screening of modulators of either the expression of the gene or the gene product itself can be done. The gene products of differentially expressed genes are sometimes referred to herein as “CA proteins” or “CAP”. The CAP may be a fragment, or alternatively, be the full-length protein to the fragment encoded by the nucleic acids of Tables 1-16 (human genomic sequences of SEQ ID NOS: 4, 10, 18, 26, 34, 44, 50, 60, 82, 88, 112, 122, 128, 136, 154, and 170, and sequences of SEQ ID NOS: 5, 11, 13, 19, 27, 29, 35, 37, 39, 45, 51, 53, 55, 61, 63, 65, 67, 69, 71, 73, 75, 83, 89, 91, 93, 95, 97, 99, 101, 103, 105, 107, 113, 115, 117, 123, 129, 137, 139, 141, 143, 145, 147, 149, 155, 157, 159, 161, 163, 165, 171, and 173 corresponding to the human mRNAs generated therefrom). In a preferred embodiment, the CAP is selected from the human protein sequences shown in Tables 1-16 (of SEQ ID NOS: 6, 12, 14, 20, 28, 30, 36, 38, 40, 46, 52, 54, 56, 62, 64, 66, 68, 70, 72, 74, 76, 84, 90, 92, 94, 96, 98, 100, 102, 104, 106, 108, 114, 116, 118, 124, 130, 138, 140, 142, 144, 146, 148, 150, 156, 158, 160, 162, 164, 166, 172, and 174). In another embodiment, the sequences are sequence variants as further described herein.

[0217] Preferably, the CAP is a fragment approximately 14 to 24 amino acids in length. More preferably the fragment is a soluble fragment. Preferably, the fragment includes a non-transmembrane region. In a preferred embodiment, the fragment has an N-terminal Cys to aid in solubility. In one embodiment, the C-terminus of the fragment is kept as a free acid and the N-terminus is a free amine to aid in coupling, e.g., to a cysteine.

[0218] In one embodiment the CA proteins are conjugated to an immunogenic agent as discussed herein. In one embodiment the CA protein is conjugated to BSA.

[0219] In a preferred embodiment, screening is done to alter the biological function of the expression product of the CA gene. Again, having identified the importance of a gene in a particular state, screening for agents that bind and/or modulate the biological activity of the gene product can be run as is more fully outlined below.

[0220] In a preferred embodiment, screens are designed to first find candidate agents that can bind to CA proteins, and then these agents may be used in assays that evaluate the ability of the candidate agent to modulate the CAP activity and the cancer phenotype. Thus, as will be appreciated by those in the art, there are a number of different assays that may be run; binding assays and activity assays.

[0221] In a preferred embodiment, binding assays are done. In general, purified or isolated gene product is used; that is, the gene products of one or more CA nucleic acids are made. In general, this is done as is known in the art. For example, antibodies are generated to the protein gene products, and standard immunoassays are run to determine the amount of protein present. Alternatively, cells comprising the CA proteins can be used in the assays.

[0222] Thus, in a preferred embodiment, the methods comprise combining a CA protein and a candidate bioactive agent, and determining the binding of the candidate agent to the CA protein. Preferred embodiments utilize the human or mouse CA protein, although other mammalian proteins may also be used, for example for the development of animal models of human disease. In some embodiments, as outlined herein, variant or derivative CA proteins may be used.

[0223] Generally, in a preferred embodiment of the methods herein, the CA protein or the candidate agent is non-diffusably bound to an insoluble support having isolated sample receiving areas (e.g. a microtiter plate, an array, etc.). The insoluble support may be made of any composition to which the compositions can be bound, is readily separated from soluble material, and is otherwise compatible with the overall method of screening. The surface of such supports may be solid or porous and of any convenient shape. Examples of suitable insoluble supports include microtiter plates, arrays, membranes and beads. These are typically made of glass, plastic (e.g., polystyrene), polysaccharides, nylon or nitrocellulose, Teflon®, etc. Microtiter plates and arrays are especially convenient because a large number of assays can be carried out simultaneously, using small amounts of reagents and samples.

[0224] The particular manner of binding of the composition is not crucial so long as it is compatible with the reagents and overall methods of the invention, maintains the activity of the composition and is nondiffusable. Preferred methods of binding include the use of antibodies (which do not sterically block either the ligand binding site or activation sequence when the protein is bound to the support), direct binding to “sticky” or ionic supports, chemical crosslinking, the synthesis of the protein or agent on the surface, etc. Following binding of the protein or agent, excess unbound material is removed by washing. The sample receiving areas may then be blocked through incubation with bovine serum albumin (BSA), casein or other innocuous protein or other moiety.

[0225] In a preferred embodiment, the CA protein is bound to the support, and a candidate bioactive agent is added to the assay. Alternatively, the candidate agent is bound to the support and the CA protein is added. Novel binding agents include specific antibodies, non-natural binding agents identified in screens of chemical libraries, peptide analogs, etc. Of particular interest are screening assays for agents that have a low toxicity for human cells. A wide variety of assays may be used for this purpose, including labeled in vitro protein-protein binding assays, electrophoretic mobility shift assays, immunoassays for protein binding, functional assays (phosphorylation assays, etc.) and the like.

[0226] The determination of the binding of the candidate bioactive agent to the CA protein may be done in a number of ways. In a preferred embodiment, the candidate bioactive agent is labeled, and binding determined directly. For example, this may be done by attaching all or a portion of the CA protein to a solid support, adding a labeled candidate agent (for example a fluorescent label), washing off excess reagent, and determining whether the label is present on the solid support. Various blocking and washing steps may be utilized as is known in the art.

[0227] By “labeled” herein is meant that the compound is either directly or indirectly labeled with a label which provides a detectable signal, e.g. radioisotope, fluorescers, enzyme, antibodies, particles such as magnetic particles, chemiluminescers, or specific binding molecules, etc. Specific binding molecules include pairs, such as biotin and streptavidin, digoxin and antidigoxin etc. For the specific binding members, the complementary member would normally be labeled with a molecule which provides for detection, in accordance with known procedures, as outlined above. The label can directly or indirectly provide a detectable signal.

[0228] In some embodiments, only one of the components is labeled. For example, the proteins (or proteinaceous candidate agents) may be labeled at tyrosine positions using ¹²⁵I, or with fluorophores. Alternatively, more than one component may be labeled with different labels; using ¹²⁵I for the proteins, for example, and a fluorophore for the candidate agents.

[0229] In a preferred embodiment, the binding of the candidate bioactive agent is determined through the use of competitive binding assays. In this embodiment, the competitor is a binding moiety known to bind to the target molecule (i.e. CA protein), such as an antibody, peptide, binding partner, ligand, etc. Under certain circumstances, there may be competitive binding as between the bioactive agent and the binding moiety, with the binding moiety displacing the bioactive agent.

[0230] In one embodiment, the candidate bioactive agent is labeled. Either the candidate bioactive agent, or the competitor, or both, is added first to the protein for a time sufficient to allow binding, if present. Incubations may be performed at any temperature which facilitates optimal activity, typically between 4 and 40° C. Incubation periods are selected for optimum activity, but may also be optimized to facilitate rapid high throughput screening. Typically between 0.1 and 1 hour will be sufficient. Excess reagent is generally removed or washed away. The second component is then added, and the presence or absence of the labeled component is followed, to indicate binding.

[0231] In a preferred embodiment, the competitor is added first, followed by the candidate bioactive agent. Displacement of the competitor is an indication that the candidate bioactive agent is binding to the CA protein and thus is capable of binding to, and potentially modulating, the activity of the CA protein. In this embodiment, either component can be labeled. Thus, for example, if the competitor is labeled, the presence of label in the wash solution indicates displacement by the agent. Alternatively, if the candidate bioactive agent is labeled, the presence of the label on the support indicates displacement.

[0232] In an alternative embodiment, the candidate bioactive agent is added first, with incubation and washing, followed by the competitor. The absence of binding by the competitor may indicate that the bioactive agent is bound to the CA protein with a higher affinity. Thus, if the candidate bioactive agent is labeled, the presence of the label on the support, coupled with a lack of competitor binding, may indicate that the candidate agent is capable of binding to the CA protein.

[0233] In a preferred embodiment, the methods comprise differential screening to identity bioactive agents that are capable of modulating the activity of the CA proteins. In this embodiment, the methods comprise combining a CA protein and a competitor in a first sample. A second sample comprises a candidate bioactive agent, a CA protein and a competitor. The binding of the competitor is determined for both samples, and a change, or difference in binding between the two samples indicates the presence of an agent capable of binding to the CA protein and potentially modulating its activity. That is, if the binding of the competitor is different in the second sample relative to the first sample, the agent is capable of binding to the CA protein.

[0234] Alternatively, a preferred embodiment utilizes differential screening to identify drug candidates that bind to the native CA protein, but cannot bind to modified CA proteins. The structure of the CA protein may be modeled, and used in rational drug design to synthesize agents that interact with that site. Drug candidates that affect CA bioactivity are also identified by screening drugs for the ability to either enhance or reduce the activity of the protein.

[0235] Positive controls and negative controls may be used in the assays. Preferably all control and test samples are performed in at least triplicate to obtain statistically significant results. Incubation of all samples is for a time sufficient for the binding of the agent to the protein. Following incubation, all samples are washed free of non-specifically bound material and the amount of bound, generally labeled agent determined. For example, where a radiolabel is employed, the samples may be counted in a scintillation counter to determine the amount of bound compound.

[0236] A variety of other reagents may be included in the screening assays. These include reagents like salts, neutral proteins, e.g. albumin, detergents, etc which may be used to facilitate optimal protein-protein binding and/or reduce non-specific or background interactions. Also reagents that otherwise improve the efficiency of the assay, such as protease inhibitors, nuclease inhibitors, anti-microbial agents, etc., may be used. The mixture of components may be added in any order that provides for the requisite binding.

[0237] Screening for agents that modulate the activity of CA proteins may also be done. In a preferred embodiment, methods for screening for a bioactive agent capable of modulating the activity of CA proteins comprise the steps of adding a candidate bioactive agent to a sample of CA proteins, as above, and determining an alteration in the biological activity of CA proteins. “Modulating the activity of a CA protein” includes an increase in activity, a decrease in activity, or a change in the type or kind of activity present. Thus, in this embodiment, the candidate agent should both bind to CA proteins (although this may not be necessary), and alter its biological or biochemical activity as defined herein. The methods include both in vitro screening methods, as are generally outlined above, and in vivo screening of cells for alterations in the presence, distribution, activity or amount of CA proteins.

[0238] Thus, in this embodiment, the methods comprise combining a CA sample and a candidate bioactive agent, and evaluating the effect on CA activity. By “CA activity” or grammatical equivalents herein is meant one of the CA protein's biological activities, including, but not limited to, its role in tumorigenesis, including cell division, preferably in lymphatic tissue, cell proliferation, tumor growth and transformation of cells. In one embodiment, CA activity includes activation of or by a protein encoded by a nucleic acid of Tables 1-16. An inhibitor of CA activity is the inhibition of any one or more CA activities.

[0239] In a preferred embodiment, the activity of the CA protein is increased; in another preferred embodiment, the activity of the CA protein is decreased. Thus, bioactive agents that are antagonists are preferred in some embodiments, and bioactive agents that are agonists may be preferred in other embodiments.

[0240] In a preferred embodiment, the invention provides methods for screening for bioactive agents capable of modulating the activity of a CA protein. The methods comprise adding a candidate bioactive agent, as defined above, to a cell comprising CA proteins. Preferred cell types include almost any cell. The cells contain a recombinant nucleic acid that encodes a CA protein. In a preferred embodiment, a library of candidate agents is tested on a plurality of cells.

[0241] In one aspect, the assays are evaluated in the presence or absence or previous or subsequent exposure of physiological signals, for example hormones, antibodies, peptides, antigens, cytokines, growth factors, action potentials, pharmacological agents including chemotherapeutics, radiation, carcinogenics, or other cells (i.e. cell-cell contacts). In another example, the determinations are determined at different stages of the cell cycle process.

[0242] In this way, bioactive agents are identified. Compounds with pharmacological activity are able to enhance or interfere with the activity of the CA protein.

### APPLICATIONS OF THE INVENTION

[0243] In one embodiment, a method of inhibiting cancer cell division is provided. In another embodiment, a method of inhibiting tumor growth is provided. In a further embodiment, methods of treating cells or individuals with cancer are provided.

[0244] The method comprises administration of a cancer inhibitor. In particular embodiments, the cancer inhibitor is an antisense molecule, a pharmaceutical composition, a therapeutic agent or small molecule, or a monoclonal, polyclonal, chimeric or humanized antibody. In particular embodiments, a therapeutic agent is coupled with a an antibody, preferable a monoclonal antibody.

[0245] In other embodiments, methods for detection or diagnosis of cancer cells in an individual are provided. In particular embodiments, the diagnostic/detection agent is a small molecule that preferentially binds to a CAP according to the invention. In one embodiment, the diagnostic/detection agent is an antibody, preferably a monoclonal antibody, preferably linked to a detectable agent.

[0246] In other embodiments of the invention, animal models and transgenic animals are provided, which find use in generating animal models of cancers, particularly lymphomas and carcinomas.

### (a) Antisense Molecules

[0247] In one embodiment, the cancer inhibitor is an antisense molecule. Antisense molecules as used herein include antisense or sense oligonucleotides comprising a single-stranded nucleic acid sequence (either RNA or DNA) capable of binding to target mRNA (sense) or DNA (antisense) sequences for cancer molecules. Antisense or sense oligonucleotides, according to the present invention, comprise a fragment generally at least about 14 nucleotides, preferably from about 14 to 30 nucleotides. The ability to derive an antisense or a sense oligonucleotide, based upon a cDNA sequence encoding a given protein is described in, for example, Stein and Cohen, Cancer Res. 48:2659, (1988) and van der Krol et al., BioTechniques 6:958, (1988).

[0248] Antisense molecules can be modified or unmodified RNA, DNA, or mixed polymer oligonucleotides. These molecules function by specifically binding to matching sequences resulting in inhibition of peptide synthesis (Wu-Pong, November 1994, BioPharm, 20-33) either by steric blocking or by activating an RNase H enzyme. Antisense molecules can also alter protein synthesis by interfering with RNA processing or transport from the nucleus into the cytoplasm (Mukhopadhyay & Roth, 1996, Crit. Rev. in Oncogenesis 7, 151-190). In addition, binding of single stranded DNA to RNA can result in nuclease-mediated degradation of the heteroduplex (Wu-Pong, supra). Backbone modified DNA chemistry which have thus far been shown to act as substrates for RNase H are phosphorothioates, phosphorodithioates, borontrifluoridates, and 2′-arabino and 2′-fluoro arabino-containing oligonucleotides.

[0249] Antisense molecules may be introduced into a cell containing the target nucleotide sequence by formation of a conjugate with a ligand binding molecule, as described in WO 91/04753. Suitable ligand binding molecules include, but are not limited to, cell surface receptors, growth factors, other cytokines, or other ligands that bind to cell surface receptors. Preferably, conjugation of the ligand binding molecule does not substantially interfere with the ability of the ligand binding molecule to bind to its corresponding molecule or receptor, or block entry of the sense or antisense oligonucleotide or its conjugated version into the cell. Alternatively, a sense or an antisense oligonucleotide may be introduced into a cell containing the target nucleic acid sequence by formation of an oligonucleotide-lipid complex, as described in WO 90/10448. It is understood that the use of antisense molecules or knock out and knock in models may also be used in screening assays as discussed above, in addition to methods of treatment.

### (b) RNA Interference

[0250] RNA interference refers to the process of sequence-specific post transcriptional gene silencing in animals mediated by short interfering RNAs (siRNA) (Fire et al., Nature, 391, 806 (1998)). The corresponding process in plants is referred to as post transcriptional gene silencing or RNA silencing and is also referred to as quelling in fungi. The presence of dsRNA in cells triggers the RNAi response though a mechanism that has yet to be fully characterized. This mechanism appears to be different from the interferon response that results from dsRNA mediated activation of protein kinase PKR and 2′,5′-oligoadenylate synthetase resulting in non-specific cleavage of mRNA by ribonuclease L. (reviewed in Sharp, P.A., RNA interference-2001, Genes & Development 15:485-490 (2001)).

[0251] Small interfering RNAs (siRNAs) are powerful sequence-specific reagents designed to suppress the expression of genes in cultured mammalian cells through a process known as RNA interference (RNAi). Elbashir, S. M. et al. Nature 411:494-498 (2001); Caplen, N. J. et al. Proc. Natl. Acad. Sci. USA 98:9742-9747 (2001); Harborth, J. et al. J. Cell Sci. 114:4557-4565 (2001). The term “short interfering RNA” or “siRNA” refers to a double stranded nucleic acid molecule capable of RNA interference “RNAi”, (see Kreutzer et al., WO 00/44895; Zernicka-Goetz et al. WO 01/36646; Fire, WO 99/32619; Mello and Fire, WO 01/29058). As used herein, siRNA molecules are limited to RNA molecules but further encompasses chemically modified nucleotides and non-nucleotides. siRNA gene-targeting experiments have been carried out by transient siRNA transfer into cells (achieved by such classic methods as liposome-mediated transfection, electroporation, or microinjection).

[0252] Molecules of siRNA are 21- to 23-nucleotide RNAs, with characteristic 2- to 3-nucleotide 3′-overhanging ends resembling the RNase III processing products of long double-stranded RNAs (dsRNAs) that normally initiate RNAi. When introduced into a cell, they assemble with yet-to-be-identified proteins of an endonuclease complex (RNA-induced silencing complex), which then guides target mRNA cleavage. As a consequence of degradation of the targeted mRNA, cells with a specific phenotype characteristic of suppression of the corresponding protein product are obtained. The small size of siRNAs, compared with traditional antisense molecules, prevents activation of the dsRNA-inducible interferon system present in mammalian cells. This avoids the nonspecific phenotypes normally produced by dsRNA larger than 30 base pairs in somatic cells.

[0253] Intracellular transcription of small RNA molecules is achieved by cloning the siRNA templates into RNA polymerase III (Pol III) transcription units, which normally encode the small nuclear RNA (snRNA) U6 or the human RNase P RNA H1. Two approaches have been developed for expressing siRNAs: in the first, sense and antisense strands constituting the siRNA duplex are transcribed by individual promoters (Lee, N. S. et al. Nat. Biotechnol. 20, 500-505 (2002). Miyagishi, M. & Taira, K. Nat. Biotechnol. 20, 497-500 (2002).); in the second, siRNAs are expressed as fold-back stem-loop structures that give rise to siRNAs after intracellular processing (Paul, C. P. et al. Nat. Biotechnol. 20:505-508 (2002)). The endogenous expression of siRNAs from introduced DNA templates is thought to overcome some limitations of exogenous siRNA delivery, in particular the transient loss of phenotype. U6 and H1 RNA promoters are members of the type III class of Pol III promoters. (Paule, M. R. & White, R. J. Nucleic Acids Res. 28, 1283-1298 (2000)).

[0254] Co-expression of sense and antisense siRNAs mediate silencing of target genes, whereas expression of sense or antisense siRNA alone do not greatly affect target gene expression. Transfection of plasmid DNA, rather than synthetic siRNAs, may appear advantageous, considering the danger of RNase contamination and the costs of chemically synthesized siRNAs or siRNA transcription kits. Stable expression of siRNAs allows new gene therapy applications, such as treatment of persistent viral infections. Considering the high specificity of siRNAs, the approach also allows the targeting of disease-derived transcripts with point mutations, such as RAS or TP53 oncogene transcripts, without alteration of the remaining wild-type allele. Finally, by high-throughput sequence analysis of the various genomes, the DNA-based methodology may also be a cost-effective alternative for automated genome-wide loss-of-function phenotypic analysis, especially when combined with miniaturized array-based phenotypic screens. (Ziauddin, J. & Sabatini, D. M. Nature 411:107-110 (2001)).

[0255] The presence of long dsRNAs in cells stimulates the activity of a ribonuclease III enzyme referred to as dicer. Dicer is involved in the processing of the dsRNA into short pieces of dsRNA known as short interfering RNAs (siRNA) (Berstein et al., 2001, Nature, 409:363 (2001)). Short interfering RNAs derived from dicer activity are typically about 21-23 nucleotides in length and comprise about 19 base pair duplexes. Dicer has also been implicated in the excision of 21 and 22 nucleotide small temporal RNAs (stRNA) from precursor RNA of conserved structure that are implicated in translational control (Hutvagner et al., Science, 293, 834 (2001)). The RNAi response also features an endonuclease complex containing a siRNA, commonly referred to as an RNA-induced silencing complex (RISC), which mediates cleavage of single stranded RNA having sequence homologous to the siRNA. Cleavage of the target RNA takes place in the middle of the region complementary to the guide sequence of the siRNA duplex (Elbashir et al., Genes Dev., 15, 188 (2001)).

[0256] This invention provides an expression system comprising an isolated nucleic acid molecule comprising a sequence capable of specifically hybridizing to the CA sequences. In an embodiment, the nucleic acid molecule is capable of inhibiting the expression of the CA protein. A method of inhibiting expression of CA inside a cell by a vector-directed expression of a short RNA which short RNA can fold in itself and create a double strand RNA having CA mRNA sequence identity and able to trigger posttranscriptional gene silencing, or RNA interference (RNAi), of the CA gene inside the cell. In another method a short double strand RNA having CA mRNA sequence identity is delivered inside the cell to trigger posttranscriptional gene silencing, or RNAi, of the CA gene. In various embodiments, the nucleic acid molecule is at least a 7 mer, at least a 10 mer, or at least a 20 mer. In a further embodiment, the sequence is unique.

### (c) Pharmaceutical Compositions

[0257] Pharmaceutical compositions encompassed by the present invention include as active agent, the polypeptides, polynucleotides, antisense oligonucleotides, or antibodies of the invention disclosed herein in a therapeutically effective amount. An “effective amount” is an amount sufficient to effect beneficial or desired results, including clinical results. An effective amount can be administered in one or more administrations. For purposes of this invention, an effective amount of an adenoviral vector is an amount that is sufficient to palliate, ameliorate, stabilize, reverse, slow or delay the progression of the disease state.

[0258] The compositions can be used to treat cancer as well as metastases of primary cancer. In addition, the pharmaceutical compositions can be used in conjunction with conventional methods of cancer treatment, e.g., to sensitize tumors to radiation or conventional chemotherapy. The terms “treatment”, “treating”, “treat” and the like are used herein to generally refer to obtaining a desired pharmacologic and/or physiologic effect. The effect may be prophylactic in terms of completely or partially preventing a disease or symptom thereof and/or may be therapeutic in terms of a partial or complete stabilization or cure for a disease and/or adverse effect attributable to the disease. “Treatment” as used herein covers any treatment of a disease in a mammal, particularly a human, and includes: (a) preventing the disease or symptom from occurring in a subject which may be predisposed to the disease or symptom but has not yet been diagnosed as having it; (b) inhibiting the disease symptom, i.e., arresting its development; or (c) relieving the disease symptom, i.e., causing regression of the disease or symptom.

[0259] Where the pharmaceutical composition comprises an antibody that specifically binds to a gene product encoded by a differentially expressed polynucleotide, the antibody can be coupled to a drug for delivery to a treatment site or coupled to a detectable label to facilitate imaging of a site comprising cancer cells, such as prostate cancer cells. Methods for coupling antibodies to drugs and detectable labels are well known in the art, as are methods for imaging using detectable labels.

[0260] A “patient” for the purposes of the present invention includes both humans and other animals, particularly mammals, and organisms. Thus the methods are applicable to both human therapy and veterinary applications. In the preferred embodiment the patient is a mammal, and in the most preferred embodiment the patient is human.

[0261] The term “therapeutically effective amount” as used herein refers to an amount of a therapeutic agent to treat, ameliorate, or prevent a desired disease or condition, or to exhibit a detectable therapeutic or preventative effect. The effect can be detected by, for example, chemical markers or antigen levels. Therapeutic effects also include reduction in physical symptoms, such as decreased body temperature. The precise effective amount for a subject will depend upon the subject's size and health, the nature and extent of the condition, and the therapeutics or combination of therapeutics selected for administration. The effective amount for a given situation is determined by routine experimentation and is within the judgment of the clinician. For purposes of the present invention, an effective dose will generally be from about 0.01 mg/kg to about 5 mg/kg, or about 0.01 mg/kg to about 50 mg/kg or about 0.05 mg/kg to about 10 mg/kg of the compositions of the present invention in the individual to which it is administered.

[0262] A pharmaceutical composition can also contain a pharmaceutically acceptable carrier. The term “pharmaceutically acceptable carrier” refers to a carrier for administration of a therapeutic agent, such as antibodies or a polypeptide, genes, and other therapeutic agents. The term refers to any pharmaceutical carrier that does not itself induce the production of antibodies harmful to the individual receiving the composition, and which can be administered without undue toxicity. Suitable carriers can be large, slowly metabolized macromolecules such as proteins, polysaccharides, polylactic acids, polyglycolic acids, polymeric amino acids, amino acid copolymers, and inactive virus particles. Such carriers are well known to those of ordinary skill in the art. Pharmaceutically acceptable carriers in therapeutic compositions can include liquids such as water, saline, glycerol and ethanol. Auxiliary substances, such as wetting or emulsifying agents, pH buffering substances, and the like, can also be present in such vehicles. Typically, the therapeutic compositions are prepared as injectables, either as liquid solutions or suspensions; solid forms suitable for solution in, or suspension in, liquid vehicles prior to injection can also be prepared. Liposomes are included within the definition of a pharmaceutically acceptable carrier. Pharmaceutically acceptable salts can also be present in the pharmaceutical composition, e.g., mineral acid salts such as hydrochlorides, hydrobromides, phosphates, sulfates, and the like; and the salts of organic acids such as acetates, propionates, malonates, benzoates, and the like. A thorough discussion of pharmaceutically acceptable excipients is available in Remington: The Science and Practice of Pharmacy (1995) Alfonso Gennaro, Lippincott, Williams, & Wilkins.

[0263] The pharmaceutical compositions can be prepared in various forms, such as granules, tablets, pills, suppositories, capsules, suspensions, salves, lotions and the like. Pharmaceutical grade organic or inorganic carriers and/or diluents suitable for oral and topical use can be used to make up compositions containing the therapeutically-active compounds. Diluents known to the art include aqueous media, vegetable and animal oils and fats. Stabilizing agents, wetting and emulsifying agents, salts for varying the osmotic pressure or buffers for securing an adequate pH value, and skin penetration enhancers can be used as auxiliary agents.

[0264] The pharmaceutical compositions of the present invention comprise a CA protein in a form suitable for administration to a patient. In the preferred embodiment, the pharmaceutical compositions are in a water soluble form, such as being present as pharmaceutically acceptable salts, which is meant to include both acid and base addition salts. “Pharmaceutically acceptable acid addition salt” refers to those salts that retain the biological effectiveness of the free bases and that are not biologically or otherwise undesirable, formed with inorganic acids such as hydrochloric acid, hydrobromic acid, sulfuric acid, nitric acid, phosphoric acid and the like, and organic acids such as acetic acid, propionic acid, glycolic acid, pyruvic acid, oxalic acid, maleic acid, malonic acid, succinic acid, fumaric acid, tartaric acid, citric acid, benzoic acid, cinnamic acid, mandelic acid, methanesulfonic acid, ethanesulfonic acid, p-toluenesulfonic acid, salicylic acid and the like. “Pharmaceutically acceptable base addition salts” include those derived from inorganic bases such as sodium, potassium, lithium, ammonium, calcium, magnesium, iron, zinc, copper, manganese, aluminum salts and the like. Particularly preferred are the ammonium, potassium, sodium, calcium, and magnesium salts. Salts derived from pharmaceutically acceptable organic non-toxic bases include salts of primary, secondary, and tertiary amines, substituted amines including naturally occurring substituted amines, cyclic amines and basic ion exchange resins, such as isopropylamine, trimethylamine, diethylamine, triethylamine, tripropylamine, and ethanolamine.

[0265] The pharmaceutical compositions may also include one or more of the following: carrier proteins such as serum albumin; buffers; fillers such as microcrystalline cellulose, lactose, corn and other starches; binding agents; sweeteners and other flavoring agents; coloring agents; and polyethylene glycol. Additives are well known in the art, and are used in a variety of formulations.

[0266] The compounds having the desired pharmacological activity may be administered in a physiologically acceptable carrier to a host, as previously described. The agents may be administered in a variety of ways, orally, parenterally e.g., subcutaneously, intraperitoneally, intravascularly, etc. Depending upon the manner of introduction, the compounds may be formulated in a variety of ways. The concentration of therapeutically active compound in the formulation may vary from about 0.1-100% wgt/vol. Once formulated, the compositions contemplated by the invention can be (1) administered directly to the subject (e.g., as polynucleotide, polypeptides, small molecule agonists or antagonists, and the like); or (2) delivered ex vivo, to cells derived from the subject (e.g., as in ex vivo gene therapy). Direct delivery of the compositions will generally be accomplished by parenteral injection, e.g., subcutaneously, intraperitoneally, intravenously or intramuscularly, intratumoral or to the interstitial space of a tissue. Other modes of administration include oral and pulmonary administration, suppositories, and transdermal applications, needles, and gene guns or hyposprays. Dosage treatment can be a single dose schedule or a multiple dose schedule.

[0267] Methods for the ex vivo delivery and reimplantation of transformed cells into a subject are known in the art and described in e.g., International Publication No. WO 93/14778. Examples of cells useful in ex vivo applications include, for example, stem cells, particularly hematopoetic, lymph cells, macrophages, dendritic cells, or tumor cells. Generally, delivery of nucleic acids for both ex vivo and in vitro applications can be accomplished by, for example, dextran-mediated transfection, calcium phosphate precipitation, polybrene mediated transfection, protoplast fusion, electroporation, encapsulation of the polynucleotide(s) in liposomes, and direct microinjection of the DNA into nuclei, all well known in the art.

[0268] Once differential expression of a gene corresponding to a CA polynucleotide described herein has been found to correlate with a proliferative disorder, such as neoplasia, dysplasia, and hyperplasia, the disorder can be amenable to treatment by administration of a therapeutic agent based on the provided polynucleotide, corresponding polypeptide or other corresponding molecule (e.g., antisense, ribozyme, etc.). In other embodiments, the disorder can be amenable to treatment by administration of a small molecule drug that, for example, serves as an inhibitor (antagonist) of the function of the encoded gene product of a gene having increased expression in cancerous cells relative to normal cells or as an agonist for gene products that are decreased in expression in cancerous cells (e.g., to promote the activity of gene products that act as tumor suppressors).

[0269] The dose and the means of administration of the inventive pharmaceutical compositions are determined based on the specific qualities of the therapeutic composition, the condition, age, and weight of the patient, the progression of the disease, and other relevant factors. For example, administration of polynucleotide therapeutic compositions agents includes local or systemic administration, including injection, oral administration, particle gun or catheterized administration, and topical administration. Preferably, the therapeutic polynucleotide composition contains an expression construct comprising a promoter operably linked to a polynucleotide of at least 12, 22, 25, 30, or 35 contiguous nt of the polynucleotide disclosed herein. Various methods can be used to administer the therapeutic composition directly to a specific site in the body. For example, a small metastatic lesion is located and the therapeutic composition injected several times in several different locations within the body of tumor. Alternatively, arteries that serve a tumor are identified, and the therapeutic composition injected into such an artery, in order to deliver the composition directly into the tumor. A tumor that has a necrotic center is aspirated and the composition injected directly into the now empty center of the tumor. An antisense composition is directly administered to the surface of the tumor, for example, by topical application of the composition. X-ray imaging is used to assist in certain of the above delivery methods.

[0270] Targeted delivery of therapeutic compositions containing an antisense polynucleotide, subgenomic polynucleotides, or antibodies to specific tissues can also be used. Receptor-mediated DNA delivery techniques are described in, for example, Findeis et al., Trends Biotechnol. (1993) 11:202; Chiou et al., Gene Therapeutics: Methods And Applications Of Direct Gene Transfer (J. A. Wolff, ed.) (1994); Wu et al., J. Biol. Chem. (1988) 263:621; Wu et al., J. Biol. Chem. (1994) 269:542; Zenke et al., Proc. Natl. Acad. Sci. (USA) (1990) 87:3655; Wu et al., J. Biol. Chem. (1991) 266:338. Therapeutic compositions containing a polynucleotide are administered in a range of about 100 ng to about 200 mg of DNA for local administration in a gene therapy protocol. Concentration ranges of about 500 ng to about 50 mg, about 1 μg to about 2 mg, about 5 μg to about 500 μg, and about 20 μg to about 100 μg of DNA can also be used during a gene therapy protocol. Factors such as method of action (e.g., for enhancing or inhibiting levels of the encoded gene product) and efficacy of transformation and expression are considerations that will affect the dosage required for ultimate efficacy of the antisense subgenomic polynucleotides. Where greater expression is desired over a larger area of tissue, larger amounts of antisense subgenomic polynucleotides or the same amounts re-administered in a successive protocol of administrations, or several administrations to different adjacent or close tissue portions of, for example, a tumor site, may be required to effect a positive therapeutic outcome. In all cases, routine experimentation in clinical trials will determine specific ranges for optimal therapeutic effect.

[0271] The therapeutic polynucleotides and polypeptides of the present invention can be delivered using gene delivery vehicles. The gene delivery vehicle can be of viral or non-viral origin (see generally, Jolly, Cancer Gene Therapy (1994) 1:51; Kimura, Human Gene Therapy (1994) 5:845; Connelly, Human Gene Therapy (1995) 1:185; and Kaplitt, Nature Genetics (1994) 6:148). Expression of such coding sequences can be induced using endogenous mammalian or heterologous promoters. Expression of the coding sequence can be either constitutive or regulated.

[0272] Viral-based vectors for delivery of a desired polynucleotide and expression in a desired cell are well known in the art. Exemplary viral-based vehicles include, but are not limited to, recombinant retroviruses (see, e.g., WO 90/07936; WO 94/03622; WO 93/25698; WO 93/25234; U.S. Pat. No. 5,219,740; WO 93/11230; WO 93/10218; U.S. Pat. No. 4,777,127; GB Patent No. 2,200,651; EP 0 345 242; and WO 91/02805), alphavirus-based vectors (e.g., Sindbis virus vectors, Semliki forest virus (ATCC VR-67; ATCC VR-1247), Ross River virus (ATCC VR-373; ATCC VR-1246) and Venezuelan equine encephalitis virus (ATCC VR-923; ATCC VR-1250; ATCC VR 1249; ATCC VR-532)), and adeno-associated virus (AAV) vectors (see, e.g., WO 94/12649, WO 93/03769; WO 93/19191; WO 94/28938; WO 95/11984 and WO 95/00655). Administration of DNA linked to killed adenovirus as described in Curiel, Hum. Gene Ther. (1992) 3:147 can also be employed.

[0273] Non-viral delivery vehicles and methods can also be employed, including, but not limited to, polycationic condensed DNA linked or unlinked to killed adenovirus alone (see, e.g., Curiel, Hum. Gene Ther. (1992) 3:147); ligand-linked DNA (see, e.g., Wu, J. Biol. Chem. (1989) 264:16985); eukaryotic cell delivery vehicles cells (see, e.g., U.S. Pat. No. 5,814,482; WO 95/07994; WO 96/17072; WO 95/30763; and WO 97/42338) and nucleic charge neutralization or fusion with cell membranes. Naked DNA can also be employed. Exemplary naked DNA introduction methods are described in WO 90/11092 and U.S. Pat. No. 5,580,859. Liposomes that can act as gene delivery vehicles are described in U.S. Pat. No. 5,422,120; WO 95/13796; WO 94/23697; WO 91/14445; and EP 0524968. Additional approaches are described in Philip, Mol. Cell. Biol. (1994) 14:2411, and in Woffendin, Proc. Natl. Acad. Sci. (1994) 91:1581.

[0274] Further non-viral delivery suitable for use includes mechanical delivery systems such as the approach described in Woffendin et al., Proc. Natl. Acad. Sci. USA (1994) 91(24):11581. Moreover, the coding sequence and the product of expression of such can be delivered through deposition of photopolymerized hydrogel materials or use of ionizing radiation (see, e.g., U.S. Pat. No. 5,206,152 and WO 92/11033). Other conventional methods for gene delivery that can be used for delivery of the coding sequence include, for example, use of hand-held gene transfer particle gun (see, e.g., U.S. Pat. No. 5,149,655); use of ionizing radiation for activating transferred gene (see, e.g., U.S. Pat. No. 5,206,152 and WO 92/11033).

[0275] The administration of the CA proteins and modulators of the present invention can be done in a variety of ways as discussed above, including, but not limited to, orally, subcutaneously, intravenously, intranasally, transdermally, intraperitoneally, intramuscularly, intrapulmonary, vaginally, rectally, or intraocularly. In some instances, for example, in the treatment of wounds and inflammation, the CA proteins and modulators may be directly applied as a solution or spray.

[0276] In a preferred embodiment, CA proteins and modulators are administered as therapeutic agents, and can be formulated as outlined above. Similarly, CA genes (including both the full-length sequence, partial sequences, or regulatory sequences of the CA coding regions) can be administered in gene therapy applications, as is known in the art. These CA genes can include antisense applications, either as gene therapy (i.e. for incorporation into the genome) or as antisense compositions, as will be appreciated by those in the art.

[0277] Thus, in one embodiment, methods of modulating CA gene activity in cells or organisms are provided. In one embodiment, the methods comprise administering to a cell an anti-CA antibody that reduces or eliminates the biological activity of an endogenous CA protein. Alternatively, the methods comprise administering to a cell or organism a recombinant nucleic acid encoding a CA protein. As will be appreciated by those in the art, this may be accomplished in any number of ways. In a preferred embodiment, for example when the CA sequence is down-regulated in cancer, the activity of the CA gene product is increased by increasing the amount of CA expression in the cell, for example by overexpressing the endogenous CA gene or by administering a gene encoding the CA sequence, using known gene-therapy techniques. In a preferred embodiment, the gene therapy techniques include the incorporation of the exogenous gene using enhanced homologous recombination (EHR), for example as described in PCT/US93/03868, hereby incorporated by reference in its entirety. Alternatively, for example when the CA sequence is up-regulated in cancer, the activity of the endogenous CA gene is decreased, for example by the administration of a CA antisense nucleic acid.

### (d) Vaccines

[0278] In a preferred embodiment, CA genes are administered as DNA vaccines, either single genes or combinations of CA genes. Naked DNA vaccines are generally known in the art. Brower, Nature Biotechnology, 16:1304-1305 (1998).

[0279] In one embodiment, CA genes of the present invention are used as DNA vaccines. Methods for the use of genes as DNA vaccines are well known to one of ordinary skill in the art, and include placing a CA gene or portion of a CA gene under the control of a promoter for expression in a patient with cancer. The CA gene used for DNA vaccines can encode full-length CA proteins, but more preferably encodes portions of the CA proteins including peptides derived from the CA protein. In a preferred embodiment a patient is immunized with a DNA vaccine comprising a plurality of nucleotide sequences derived from a CA gene. Similarly, it is possible to immunize a patient with a plurality of CA genes or portions thereof. Without being bound by theory, expression of the polypeptide encoded by the DNA vaccine, cytotoxic T-cells, helper T-cells and antibodies are induced that recognize and destroy or eliminate cells expressing CA proteins.

[0280] In a preferred embodiment, the DNA vaccines include a gene encoding an adjuvant molecule with the DNA vaccine. Such adjuvant molecules include cytokines that increase the immunogenic response to the CA polypeptide encoded by the DNA vaccine. Additional or alternative adjuvants are known to those of ordinary skill in the art and find use in the invention.

### (e) Antibodies

[0281] In one embodiment, a cancer inhibitor is an antibody as discussed above. In one embodiment, the CA proteins of the present invention may be used to generate polyclonal and monoclonal antibodies to CA proteins, which are useful as described herein. Similarly, the CA proteins can be coupled, using standard technology, to affinity chromatography columns. These columns may then be used to purify CA antibodies. In a preferred embodiment, the antibodies are generated to epitopes unique to a CA protein; that is, the antibodies show little or no cross-reactivity to other proteins. These antibodies find use in a number of applications. For example, the CA antibodies may be coupled to standard affinity chromatography columns and used to purify CA proteins. The antibodies may also be used therapeutically as blocking polypeptides, as outlined above, since they will specifically bind to the CA protein.

[0282] The present invention further provides methods for detecting the presence of and/or measuring a level of a polypeptide in a biological sample, which CA polypeptide is encoded by a CA polynucleotide that is differentially expressed in a cancer cell, using an antibody specific for the encoded polypeptide. The methods generally comprise: a) contacting the sample with an antibody specific for a polypeptide encoded by a CA polynucleotide that is differentially expressed in a prostate cancer cell; and b) detecting binding between the antibody and molecules of the sample.

[0283] Detection of specific binding of the antibody specific for the encoded cancer-associated polypeptide, when compared to a suitable control is an indication that encoded polypeptide is present in the sample. Suitable controls include a sample known not to contain the encoded CA polypeptide or known not to contain elevated levels of the polypeptide; such as normal tissue, and a sample contacted with an antibody not specific for the encoded polypeptide, e.g., an anti-idiotype antibody. A variety of methods to detect specific antibody-antigen interactions are known in the art and can be used in the method, including, but not limited to, standard immunohistological methods, immunoprecipitation, an enzyme immunoassay, and a radioimmunoassay. In general, the specific antibody will be detectably labeled, either directly or indirectly. Direct labels include radioisotopes; enzymes whose products are detectable (e.g., luciferase, 3-galactosidase, and the like); fluorescent labels (e.g., fluorescein isothiocyanate, rhodamine, phycoerythrin, and the like); fluorescence emitting metals, e.g., ¹⁵²Eu, or others of the lanthanide series, attached to the antibody through metal chelating groups such as EDTA; chemiluminescent compounds, e.g., luminol, isoluminol, acridinium salts, and the like; bioluminescent compounds, e.g., luciferin, aequorin (green fluorescent protein), and the like. The antibody may be attached (coupled) to an insoluble support, such as a polystyrene plate or a bead. Indirect labels include second antibodies specific for antibodies specific for the encoded polypeptide (“first specific antibody”), wherein the second antibody is labeled as described above; and members of specific binding pairs, e.g., biotin-avidin, and the like. The biological sample may be brought into contact with and immobilized on a solid support or carrier, such as nitrocellulose, that is capable of immobilizing cells, cell particles, or soluble proteins. The support may then be washed with suitable buffers, followed by contacting with a detectably-labeled first specific antibody. Detection methods are known in the art and will be chosen as appropriate to the signal emitted by the detectable label. Detection is generally accomplished in comparison to suitable controls, and to appropriate standards.

[0284] In some embodiments, the methods are adapted for use in vivo, e.g., to locate or identify sites where cancer cells are present. In these embodiments, a detectably-labeled moiety, e.g., an antibody, which is specific for a cancer-associated polypeptide is administered to an individual (e.g., by injection), and labeled cells are located using standard imaging techniques, including, but not limited to, magnetic resonance imaging, computed tomography scanning, and the like. In this manner, cancer cells are differentially labeled.

### (f) Detection and Diagnosis of Cancers

[0285] Without being bound by theory, it appears that the various CA sequences are important in cancers. Accordingly, disorders based on mutant or variant CA genes may be determined. In one embodiment, the invention provides methods for identifying cells containing variant CA genes comprising determining all or part of the sequence of at least one endogenous CA genes in a cell. As will be appreciated by those in the art, this may be done using any number of sequencing techniques. In a preferred embodiment, the invention provides methods of identifying the CA genotype of an individual comprising determining all or part of the sequence of at least one CA gene of the individual. This is generally done in at least one tissue of the individual, and may include the evaluation of a number of tissues or different samples of the same tissue. The method may include comparing the sequence of the sequenced CA gene to a known CA gene, i.e., a wild-type gene. As will be appreciated by those in the art, alterations in the sequence of some CA genes can be an indication of either the presence of the disease, or propensity to develop the disease, or prognosis evaluations.

[0286] The sequence of all or part of the CA gene can then be compared to the sequence of a known CA gene to determine if any differences exist. This can be done using any number of known homology programs, such as Bestfit, etc. In a preferred embodiment, the presence of a difference in the sequence between the CA gene of the patient and the known CA gene is indicative of a disease state or a propensity for a disease state, as outlined herein.

[0287] In a preferred embodiment, the CA genes are used as probes to determine the number of copies of the CA gene in the genome. For example, some cancers exhibit chromosomal deletions or insertions, resulting in an alteration in the copy number of a gene.

[0288] In another preferred embodiment CA genes are used as probes to determine the chromosomal location of the CA genes. Information such as chromosomal location finds use in providing a diagnosis or prognosis in particular when chromosomal abnormalities such as translocations, and the like are identified in CA gene loci.

[0289] The present invention provides methods of using the polynucleotides described herein for detecting cancer cells, facilitating diagnosis of cancer and the severity of a cancer (e.g., tumor grade, tumor burden, and the like) in a subject, facilitating a determination of the prognosis of a subject, and assessing the responsiveness of the subject to therapy (e.g., by providing a measure of therapeutic effect through, for example, assessing tumor burden during or following a chemotherapeutic regimen). Detection can be based on detection of a polynucleotide that is differentially expressed in a cancer cell, and/or detection of a polypeptide encoded by a polynucleotide that is differentially expressed in a cancer cell. The detection methods of the invention can be conducted in vitro or in vivo, on isolated cells, or in whole tissues or a bodily fluid e.g., blood, plasma, serum, urine, and the like).

[0290] In some embodiments, methods are provided for detecting a cancer cell by detecting expression in the cell of a transcript that is differentially expressed in a cancer cell. Any of a variety of known methods can be used for detection, including, but not limited to, detection of a transcript by hybridization with a polynucleotide that hybridizes to a polynucleotide that is differentially expressed in a prostate cancer cell; detection of a transcript by a polymerase chain reaction using specific oligonucleotide primers; in situ hybridization of a cell using as a probe a polynucleotide that hybridizes to a gene that is differentially expressed in a prostate cancer cell. The methods can be used to detect and/or measure mRNA levels of a gene that is differentially expressed in a cancer cell. In some embodiments, the methods comprise: a) contacting a sample with a polynucleotide that corresponds to a differentially expressed gene described herein under conditions that allow hybridization; and b) detecting hybridization, if any.

[0291] Detection of differential hybridization, when compared to a suitable control, is an indication of the presence in the sample of a polynucleotide that is differentially expressed in a cancer cell. Appropriate controls include, for example, a sample that is known not to contain a polynucleotide that is differentially expressed in a cancer cell, and use of a labeled polynucleotide of the same “sense” as the polynucleotide that is differentially expressed in the cancer cell. Conditions that allow hybridization are known in the art, and have been described in more detail above. Detection can also be accomplished by any known method, including, but not limited to, in situ hybridization, PCR (polymerase chain reaction), RT-PCR (reverse transcription-PCR), TMA, bDNA, and Nasbau and “Northern” or RNA blotting, or combinations of such techniques, using a suitably labeled polynucleotide. A variety of labels and labeling methods for polynucleotides are known in the art and can be used in the assay methods of the invention. Specificity of hybridization can be determined by comparison to appropriate controls.

[0292] Polynucleotides generally comprising at least 10 nt, at least 12 nt or at least 15 contiguous nucleotides of a polynucleotide provided herein, such as, for example, those having the sequence as depicted in Tables 1-16, are used for a variety of purposes, such as probes for detection of and/or measurement of, transcription levels of a polynucleotide that is differentially expressed in a prostate cancer cell. As will be readily appreciated by the ordinarily skilled artisan, the probe can be detectably labeled and contacted with, for example, an array comprising immobilized polynucleotides obtained from a test sample (e.g., mRNA). Alternatively, the probe can be immobilized on an array and the test sample detectably labeled. These and other variations of the methods of the invention are well within the skill in the art and are within the scope of the invention.

[0293] Nucleotide probes are used to detect expression of a gene corresponding to the provided polynucleotide. In Northern blots, mRNA is separated electrophoretically and contacted with a probe. A probe is detected as hybridizing to an mRNA species of a particular size. The amount of hybridization can be quantitated to determine relative amounts of expression, for example under a particular condition. Probes are used for in situ hybridization to cells to detect expression. Probes can also be used in vivo for diagnostic detection of hybridizing sequences. Probes are typically labeled with a radioactive isotope. Other types of detectable labels can be used such as chromophores, fluorophores, and enzymes. Other examples of nucleotide hybridization assays are described in WO92/02526 and U.S. Pat. No. 5,124,246.

[0294] PCR is another means for detecting small amounts of target nucleic acids (see, e.g., Mullis et al., Meth. Enzymol. (1987) 155:335; U.S. Pat. No. 4,683,195; and U.S. Pat. No. 4,683,202). Two primer oligonucleotides that hybridize with the target nucleic acids are used to prime the reaction. The primers can be composed of sequence within or 3′ and 5′ to the CA polynucleotides disclosed herein. Alternatively, if the primers are 3′ and 5′ to these polynucleotides, they need not hybridize to them or the complements. After amplification of the target with a thermostable polymerase, the amplified target nucleic acids can be detected by methods known in the art, e.g., Southern blot. mRNA or cDNA can also be detected by traditional blotting techniques (e.g., Southern blot, Northern blot, etc.) described in Sambrook et al., “Molecular Cloning: A Laboratory Manual” (New York, Cold Spring Harbor Laboratory, 1989) (e.g., without PCR amplification). In general, mRNA or cDNA generated from mRNA using a polymerase enzyme can be purified and separated using gel electrophoresis, and transferred to a solid support, such as nitrocellulose. The solid support is exposed to a labeled probe, washed to remove any unhybridized probe, and duplexes containing the labeled probe are detected.

[0295] Methods using PCR amplification can be performed on the DNA from a single cell, although it is convenient to use at least about 10⁵ cells. The use of the polymerase chain reaction is described in Saiki et al. (1985) Science 239:487, and a review of current techniques may be found in Sambrook, et al. Molecular Cloning: A Laboratory Manual, CSH Press 1989, pp. 14.2-14.33. A detectable label may be included in the amplification reaction. Suitable detectable labels include fluorochromes (e.g. fluorescein isothiocyanate (FITC), rhodamine, Texas Red, phycoerythrin, allophycocyanin, 6-carboxyfluorescein (6-FAM), 2′,7′-dimethoxy-4′,5′-dichloro-6-carboxyfluorescein, 6-carboxy-X-rhodamine (ROX), 6-carboxy-2′,4′,7′,4,7-hexachlorofluorescein (HEX), 5-carboxyfluorescein (5-FAM) or N,N,N′,N′-tetramethyl-6-carboxyrhodamine (TAMRA)), radioactive labels, (e.g. ³²P, ³⁵S, ³H, etc.), and the like. The label may be a two stage system, where the polynucleotides is conjugated to biotin, haptens, etc. having a high affinity binding partner, e.g. avidin, specific antibodies, etc., where the binding partner is conjugated to a detectable label. The label may be conjugated to one or both of the primers. Alternatively, the pool of nucleotides used in the amplification is labeled, so as to incorporate the label into the amplification product.

[0296] The detection methods can be provided as part of a kit. Thus, the invention further provides kits for detecting the presence and/or a level of a polynucleotide that is differentially expressed in a cancer cell (e.g., by detection of an mRNA encoded by the differentially expressed gene of interest), and/or a polypeptide encoded thereby, in a biological sample. Procedures using these kits can be performed by clinical laboratories, experimental laboratories, medical practitioners, or private individuals. The kits of the invention for detecting a polypeptide encoded by a polynucleotide that is differentially expressed in a cancer cell may comprise a moiety that specifically binds the polypeptide, which may be an antibody that binds the polypeptide or fragment thereof. The kits of the invention used for detecting a polynucleotide that is differentially expressed in a prostate cancer cell may comprise a moiety that specifically hybridizes to such a polynucleotide. The kit may optionally provide additional components that are useful in the procedure, including, but not limited to, buffers, developing reagents, labels, reacting surfaces, means for detection, control samples, standards, instructions, and interpretive information. Accordingly, the present invention provides kits for detecting prostate cancer comprising at least one of polynucleotides having the sequence as shown in Tables 1-16 or fragments thereof.

[0297] The present invention further relates to methods of detecting/diagnosing a neoplastic or preneoplastic condition in a mammal (for example, a human). “Diagnosis” as used herein generally includes determination of a subject's susceptibility to a disease or disorder, determination as to whether a subject is presently affected by a disease or disorder, prognosis of a subject affected by a disease or disorder (e.g., identification of pre-metastatic or metastatic cancerous states, stages of cancer, or responsiveness of cancer to therapy), and therametrics (e.g., monitoring a subject's condition to provide information as to the effect or efficacy of therapy).

[0298] The terms “treatment”, “treating”, “treat” and the like are used herein to generally refer to obtaining a desired pharmacologic and/or physiologic effect. The effect may be prophylactic in terms of completely or partially preventing a disease or symptom thereof and/or may be therapeutic in terms of a partial or complete stabilization or cure for a disease and/or adverse effect attributable to the disease. “Treatment” as used herein covers any treatment of a disease in a mammal, particularly a human, and includes: (a) preventing the disease or symptom from occurring in a subject which may be predisposed to the disease or symptom but has not yet been diagnosed as having it; (b) inhibiting the disease symptom, i.e., arresting its development; or (c) relieving the disease symptom, i.e., causing regression of the disease or symptom.

[0299] An “effective amount” is an amount sufficient to effect beneficial or desired results, including clinical results. An effective amount can be administered in one or more administrations.

[0300] A “cell sample” encompasses a variety of sample types obtained from an individual and can be used in a diagnostic or monitoring assay. The definition encompasses blood and other liquid samples of biological origin, solid tissue samples such as a biopsy specimen or tissue cultures or cells derived therefrom, and the progeny thereof. The definition also includes samples that have been manipulated in any way after their procurement, such as by treatment with reagents, solubilization, or enrichment for certain components, such as proteins or polynucleotides. The term “cell sample” encompasses a clinical sample, and also includes cells in culture, cell supernatants, cell lysates, serum, plasma, biological fluid, and tissue samples.

[0301] As used herein, the terms “neoplastic cells”, “neoplasia”, “tumor”, “tumor cells”, “cancer” and “cancer cells”, (used interchangeably) refer to cells which exhibit relatively autonomous growth, so that they exhibit an aberrant growth phenotype characterized by a significant loss of control of cell proliferation (i.e., de-regulated cell division). Neoplastic cells can be malignant or benign.

[0302] The terms “individual,” “subject,” “host,” and “patient,” are used interchangeably herein and refer to any mammalian subject for whom diagnosis, treatment, or therapy is desired, particularly humans. Other subjects may include cattle, dogs, cats, guinea pigs, rabbits, rats, mice, horses, and so on. Examples of conditions that can be detected/diagnosed in accordance with these methods include cancers. Polynucleotides corresponding to genes that exhibit the appropriate expression pattern can be used to detect cancer in a subject. For a review of markers of cancer, see, e.g., Hanahan et al. Cell 100:57-70 (2000).

[0303] One detection/diagnostic method comprises: (a) obtaining from a mammal (e.g., a human) a biological sample, (b) detecting the presence in the sample of a CA protein and (c) comparing the amount of product present with that in a control sample. In accordance with this method, the presence in the sample of elevated levels of a CA gene product indicates that the subject has a neoplastic or preneoplastic condition.

[0304] Biological samples suitable for use in this method include biological fluids such as serum, plasma, pleural effusions, urine and cerebro-spinal fluid, CSF, tissue samples (e.g., mammary tumor or prostate tissue slices) can also be used in the method of the invention, including samples derived from biopsies. Cell cultures or cell extracts derived, for example, from tissue biopsies can also be used.

[0305] The compound is preferably a binding protein, e.g., an antibody, polyclonal or monoclonal, or antigen binding fragment thereof, which can be labeled with a detectable marker (e.g., fluorophore, chromophore or isotope, etc). Where appropriate, the compound can be attached to a solid support such as a bead, plate, filter, resin, etc. Determination of formation of the complex can be effected by contacting the complex with a further compound (e.g., an antibody) that specifically binds to the first compound (or complex). Like the first compound, the further compound can be attached to a solid support and/or can be labeled with a detectable marker.

[0306] The identification of elevated levels of CA protein in accordance with the present invention makes possible the identification of subjects patients) that are likely to benefit from adjuvant therapy. For example, a biological sample from a post primary therapy subject (e.g., subject having undergone surgery) can be screened for the presence of circulating CA protein, the presence of elevated levels of the protein, determined by studies of normal populations, being indicative of residual tumor tissue. Similarly, tissue from the cut site of a surgically removed tumor can be examined (e.g., by immunofluorescence), the presence of elevated levels of product (relative to the surrounding tissue) being indicative of incomplete removal of the tumor. The ability to identify such subjects makes it possible to tailor therapy to the needs of the particular subject. Subjects undergoing non-surgical therapy, e.g., chemotherapy or radiation therapy, can also be monitored, the presence in samples from such subjects of elevated levels of CA protein being indicative of the need for continued treatment. Staging of the disease (for example, for purposes of optimizing treatment regimens) can also be effected, for example, by biopsy e.g., with antibody specific for a CA protein.

### (g) Animal Models and Transgenics

[0307] In another preferred embodiment CA genes find use in generating animal models of cancers, particularly lymphomas and carcinomas. As is appreciated by one of ordinary skill in the art, when the CA gene identified is repressed or diminished in CA tissue, gene therapy technology wherein antisense RNA directed to the CA gene will also diminish or repress expression of the gene. An animal generated as such serves as an animal model of CA that finds use in screening bioactive drug candidates. Similarly, gene knockout technology, for example as a result of homologous recombination with an appropriate gene targeting vector, will result in the absence of the CA protein. When desired, tissue-specific expression or knockout of the CA protein may be necessary.

[0308] It is also possible that the CA protein is overexpressed in cancer. As such, transgenic animals can be generated that overexpress the CA protein. Depending on the desired expression level, promoters of various strengths can be employed to express the transgene. Also, the number of copies of the integrated transgene can be determined and compared for a determination of the expression level of the transgene. Animals generated by such methods find use as animal models of CA and are additionally useful in screening for bioactive molecules to treat cancer.

### Characterization of CA Sequences

[0309] The CA nucleic acid sequences of the invention are depicted in Tables 1-16. The sequences in each Table include genomic DNA sequence (mouse genomic sequences mDxx-yyy; human genomic sequences hDxx-yyy), sequence corresponding to the mRNA(s) generated therefrom (mRxx-yyy; hRxx-yyy) and amino acid sequences of the proteins (mPxx-yyy; hPxx-yyy) encoded by the mRNA for both mouse and human genes. N/A indicates a gene that has been identified, but for which there has not been a name ascribed.

[0310] The mouse and human genomic DNA sequence, sequence corresponding to the mRNA(s) generated therefrom and amino acid sequences of the proteins as shown in Tables 1-16 are described according to SEQ ID NOS as follows in Table 17.

TABLE 17

| DESIGNATION | SEQ ID NO | TYPE OF SEQUENCE |
|---|---|---|
| mD24-004 | SEQ ID NO: 1 | MOUSE GENOMIC SEQUENCE |
| mR24-004.1 | SEQ ID NO: 2 | MOUSE mRNA SEQUENCE |
| mP24-004.1 | SEQ ID NO: 3 | MOUSE PROTEIN SEQUENCE |
| hD24-004 | SEQ ID NO: 4 | HUMAN GENOMIC SEQUENCE |
| hR24-004.1 | SEQ ID NO: 5 | HUMAN mRNA SEQUENCE |
| hP24-004.1 | SEQ ID NO: 6 | HUMAN PROTEIN SEQUENCE |
| mD24-006 | SEQ ID NO: 7 | MOUSE GENOMIC SEQUENCE |
| mR24-006.1 | SEQ ID NO: 8 | MOUSE mRNA SEQUENCE |
| mP24-006.1 | SEQ ID NO: 9 | MOUSE PROTEIN SEQUENCE |
| hD24-006 | SEQ ID NO: 10 | HUMAN GENOMIC SEQUENCE |
| hR24-006.1 | SEQ ID NO: 11 | HUMAN mRNA SEQUENCE |
| hP24-006.1 | SEQ ID NO: 12 | HUMAN PROTEIN SEQUENCE |
| hR24-006.2 | SEQ ID NO: 13 | HUMAN mRNA SEQUENCE |
| hP24-006.2 | SEQ ID NO: 14 | HUMAN PROTEIN SEQUENCE |
| mD24-009 | SEQ ID NO: 15 | MOUSE GENOMIC SEQUENCE |
| mR24-009.1 | SEQ ID NO: 16 | MOUSE mRNA SEQUENCE |
| mP24-009.1 | SEQ ID NO: 17 | MOUSE PROTEIN SEQUENCE |
| hD24-009 | SEQ ID NO: 18 | HUMAN GENOMIC SEQUENCE |
| hR24-009.1 | SEQ ID NO: 19 | HUMAN mRNA SEQUENCE |
| hP24-009.1 | SEQ ID NO: 20 | HUMAN PROTEIN SEQUENCE |
| mD25-006 | SEQ ID NO: 21 | MOUSE GENOMIC SEQUENCE |
| mR25-006.1 | SEQ ID NO: 22 | MOUSE mRNA SEQUENCE |
| mP25-006.1 | SEQ ID NO: 23 | MOUSE PROTEIN SEQUENCE |
| mR25-006.2 | SEQ ID NO: 24 | MOUSE mRNA SEQUENCE |
| mP25-006.2 | SEQ ID NO: 25 | MOUSE PROTEIN SEQUENCE |
| hD25-006 | SEQ ID NO: 26 | HUMAN GENOMIC SEQUENCE |
| hR25-006.1 | SEQ ID NO: 27 | HUMAN mRNA SEQUENCE |
| hP25-006.1 | SEQ ID NO: 28 | HUMAN PROTEIN SEQUENCE |
| hR25-006.2 | SEQ ID NO: 29 | HUMAN mRNA SEQUENCE |
| hP25-006.2 | SEQ ID NO: 30 | HUMAN PROTEIN SEQUENCE |
| mD25-007 | SEQ ID NO: 31 | MOUSE GENOMIC SEQUENCE |
| mR25-007.1 | SEQ ID NO: 32 | MOUSE mRNA SEQUENCE |
| mP25-007.1 | SEQ ID NO: 33 | MOUSE PROTEIN SEQUENCE |
| hD25-007 | SEQ ID NO: 34 | HUMAN GENOMIC SEQUENCE |
| hR25-007.1 | SEQ ID NO: 35 | HUMAN mRNA SEQUENCE |
| hP25-007.1 | SEQ ID NO: 36 | HUMAN PROTEIN SEQUENCE |
| hR25-007.2 | SEQ ID NO: 37 | HUMAN mRNA SEQUENCE |
| hP25-007.2 | SEQ ID NO: 38 | HUMAN PROTEIN SEQUENCE |
| hR25-007.3 | SEQ ID NO: 39 | HUMAN mRNA SEQUENCE |
| hP25-007.3 | SEQ ID NO: 40 | HUMAN PROTEIN SEQUENCE |
| mD25-008 | SEQ ID NO: 41 | MOUSE GENOMIC SEQUENCE |
| mR25-008.1 | SEQ ID NO: 42 | MOUSE mRNA SEQUENCE |
| mP25-008.1 | SEQ ID NO: 43 | MOUSE PROTEIN SEQUENCE |
| hD25-008 | SEQ ID NO: 44 | HUMAN GENOMIC SEQUENCE |
| hR25-008.1 | SEQ ID NO: 45 | HUMAN mRNA SEQUENCE |
| hP25-008.1 | SEQ ID NO: 46 | HUMAN PROTEIN SEQUENCE |
| mD25-009 | SEQ ID NO: 47 | MOUSE GENOMIC SEQUENCE |
| mR25-009.1 | SEQ ID NO: 48 | MOUSE mRNA SEQUENCE |
| mP25-009.1 | SEQ ID NO: 49 | MOUSE PROTEIN SEQUENCE |
| hD25-009 | SEQ ID NO: 50 | HUMAN GENOMIC SEQUENCE |
| hR25-009.1 | SEQ ID NO: 51 | HUMAN mRNA SEQUENCE |
| hP25-009.1 | SEQ ID NO: 52 | HUMAN PROTEIN SEQUENCE |
| hR25-009.2 | SEQ ID NO: 53 | HUMAN mRNA SEQUENCE |
| hP25-009.2 | SEQ ID NO: 54 | HUMAN PROTEIN SEQUENCE |
| hR25-009.3 | SEQ ID NO: 55 | HUMAN mRNA SEQUENCE |
| hP25-009.3 | SEQ ID NO: 56 | HUMAN PROTEIN SEQUENCE |
| mD25-013 | SEQ ID NO: 57 | MOUSE GENOMIC SEQUENCE |
| mR25-013.1 | SEQ ID NO: 58 | MOUSE mRNA SEQUENCE |
| mP25-013.1 | SEQ ID NO: 59 | MOUSE PROTEIN SEQUENCE |
| hD25-013 | SEQ ID NO: 60 | HUMAN GENOMIC SEQUENCE |
| hR25-013.1 | SEQ ID NO: 61 | HUMAN mRNA SEQUENCE |
| hP25-013.1 | SEQ ID NO: 62 | HUMAN PROTEIN SEQUENCE |
| hR25-013.2 | SEQ ID NO: 63 | HUMAN mRNA SEQUENCE |
| hP25-013.2 | SEQ ID NO: 64 | HUMAN PROTEIN SEQUENCE |
| hR25-013.3 | SEQ ID NO: 65 | HUMAN mRNA SEQUENCE |
| hP25-013.3 | SEQ ID NO: 66 | HUMAN PROTEIN SEQUENCE |
| hR25-013.4 | SEQ ID NO: 67 | HUMAN mRNA SEQUENCE |
| hP25-013.4 | SEQ ID NO: 68 | HUMAN PROTEIN SEQUENCE |
| hR25-013.5 | SEQ ID NO: 69 | HUMAN mRNA SEQUENCE |
| hP25-013.5 | SEQ ID NO: 70 | HUMAN PROTEIN SEQUENCE |
| hR25-013.6 | SEQ ID NO: 71 | HUMAN mRNA SEQUENCE |
| hP25-013.6 | SEQ ID NO: 72 | HUMAN PROTEIN SEQUENCE |
| hR25-013.7 | SEQ ID NO: 73 | HUMAN mRNA SEQUENCE |
| hP25-013.7 | SEQ ID NO: 74 | HUMAN PROTEIN SEQUENCE |
| hR25-013.8 | SEQ ID NO: 75 | HUMAN mRNA SEQUENCE |
| hP25-013.8 | SEQ ID NO: 76 | HUMAN PROTEIN SEQUENCE |
| mD25-015 | SEQ ID NO: 77 | MOUSE GENOMIC SEQUENCE |
| mR25-015.1 | SEQ ID NO: 78 | MOUSE mRNA SEQUENCE |
| mP25-015.1 | SEQ ID NO: 79 | MOUSE PROTEIN SEQUENCE |
| mR25-015.2 | SEQ ID NO: 80 | MOUSE mRNA SEQUENCE |
| mP25-015.2 | SEQ ID NO: 81 | MOUSE PROTEIN SEQUENCE |
| hD25-015 | SEQ ID NO: 82 | HUMAN GENOMIC SEQUENCE |
| hR25-015.1 | SEQ ID NO: 83 | HUMAN mRNA SEQUENCE |
| hP25-015.1 | SEQ ID NO: 84 | HUMAN PROTEIN SEQUENCE |
| mD25-017 | SEQ ID NO: 85 | MOUSE GENOMIC SEQUENCE |
| mR25-017.1 | SEQ ID NO: 86 | MOUSE mRNA SEQUENCE |
| mP25-017.1 | SEQ ID NO: 87 | MOUSE PROTEIN SEQUENCE |
| hD25-017 | SEQ ID NO: 88 | HUMAN GENOMIC SEQUENCE |
| hR25-017.1 | SEQ ID NO: 89 | HUMAN mRNA SEQUENCE |
| hP25-017.1 | SEQ ID NO: 90 | HUMAN PROTEIN SEQUENCE |
| hR25-017.2 | SEQ ID NO: 91 | HUMAN mRNA SEQUENCE |
| hP25-017.2 | SEQ ID NO: 92 | HUMAN PROTEIN SEQUENCE |
| hR25-017.3 | SEQ ID NO: 93 | HUMAN mRNA SEQUENCE |
| hP25-017.3 | SEQ ID NO: 94 | HUMAN PROTEIN SEQUENCE |
| hR25-017.4 | SEQ ID NO: 95 | HUMAN mRNA SEQUENCE |
| hP25-017.4 | SEQ ID NO: 96 | HUMAN PROTEIN SEQUENCE |
| hR25-017.5 | SEQ ID NO: 97 | HUMAN mRNA SEQUENCE |
| hP25-017.5 | SEQ ID NO: 98 | HUMAN PROTEIN SEQUENCE |
| hR25-017.6 | SEQ ID NO: 99 | HUMAN mRNA SEQUENCE |
| hP25-017.6 | SEQ ID NO: 100 | HUMAN PROTEIN SEQUENCE |
| hR25-017.7 | SEQ ID NO: 101 | HUMAN mRNA SEQUENCE |
| hP25-017.7 | SEQ ID NO: 102 | HUMAN PROTEIN SEQUENCE |
| hR25-017.8 | SEQ ID NO: 103 | HUMAN mRNA SEQUENCE |
| hP25-017.8 | SEQ ID NO: 104 | HUMAN PROTEIN SEQUENCE |
| hR25-017.9 | SEQ ID NO: 105 | HUMAN mRNA SEQUENCE |
| hP25-017.9 | SEQ ID NO: 106 | HUMAN PROTEIN SEQUENCE |
| hR25-017.10 | SEQ ID NO: 107 | HUMAN mRNA SEQUENCE |
| hP25-017.10 | SEQ ID NO: 108 | HUMAN PROTEIN SEQUENCE |
| mD25-025 | SEQ ID NO: 109 | MOUSE GENOMIC SEQUENCE |
| mR25-025.1 | SEQ ID NO: 110 | MOUSE mRNA SEQUENCE |
| mP25-025.1 | SEQ ID NO: 111 | MOUSE PROTEIN SEQUENCE |
| hD25-025 | SEQ ID NO: 112 | HUMAN GENOMIC SEQUENCE |
| hR25-025.1 | SEQ ID NO: 113 | HUMAN mRNA SEQUENCE |
| hP25-025.1 | SEQ ID NO: 114 | HUMAN PROTEIN SEQUENCE |
| hR25-025.2 | SEQ ID NO: 115 | HUMAN mRNA SEQUENCE |
| hP25-025.2 | SEQ ID NO: 116 | HUMAN PROTEIN SEQUENCE |
| hR25-025.3 | SEQ ID NO: 117 | HUMAN mRNA SEQUENCE |
| hP25-025.3 | SEQ ID NO: 118 | HUMAN PROTEIN SEQUENCE |
| mD26-002 | SEQ ID NO: 119 | MOUSE GENOMIC SEQUENCE |
| mR26-002.1 | SEQ ID NO: 120 | MOUSE mRNA SEQUENCE |
| mP26-002.1 | SEQ ID NO: 121 | MOUSE PROTEIN SEQUENCE |
| hD26-002 | SEQ ID NO: 122 | HUMAN GENOMIC SEQUENCE |
| hR26-002.1 | SEQ ID NO: 123 | HUMAN mRNA SEQUENCE |
| hP26-002.1 | SEQ ID NO: 124 | HUMAN PROTEIN SEQUENCE |
| mD26-004 | SEQ ID NO: 125 | MOUSE GENOMIC SEQUENCE |
| mR26-004.1 | SEQ ID NO: 126 | MOUSE mRNA SEQUENCE |
| mP26-004.1 | SEQ ID NO: 127 | MOUSE PROTEIN SEQUENCE |
| hD26-004 | SEQ ID NO: 128 | HUMAN GENOMIC SEQUENCE |
| hR26-004.1 | SEQ ID NO: 129 | HUMAN mRNA SEQUENCE |
| hP26-004.1 | SEQ ID NO: 130 | HUMAN PROTEIN SEQUENCE |
| mD26-005 | SEQ ID NO: 131 | MOUSE GENOMIC SEQUENCE |
| mR26-005.1 | SEQ ID NO: 132 | MOUSE mRNA SEQUENCE |
| mP26-005.1 | SEQ ID NO: 133 | MOUSE PROTEIN SEQUENCE |
| mR26-005.2 | SEQ ID NO: 134 | MOUSE mRNA SEQUENCE |
| mP26-005.2 | SEQ ID NO: 135 | MOUSE PROTEIN SEQUENCE |
| hD26-005 | SEQ ID NO: 136 | HUMAN GENOMIC SEQUENCE |
| hR26-005.1 | SEQ ID NO: 137 | HUMAN mRNA SEQUENCE |
| hP26-005.1 | SEQ ID NO: 138 | HUMAN PROTEIN SEQUENCE |
| hR26-005.2 | SEQ ID NO: 139 | HUMAN mRNA SEQUENCE |
| hP26-005.2 | SEQ ID NO: 140 | HUMAN PROTEIN SEQUENCE |
| hR26-005.3 | SEQ ID NO: 141 | HUMAN mRNA SEQUENCE |
| hP26-005.3 | SEQ ID NO: 142 | HUMAN PROTEIN SEQUENCE |
| hR26-005.4 | SEQ ID NO: 143 | HUMAN mRNA SEQUENCE |
| hP26-005.4 | SEQ ID NO: 144 | HUMAN PROTEIN SEQUENCE |
| hR26-005.5 | SEQ ID NO: 145 | HUMAN mRNA SEQUENCE |
| hP26-005.5 | SEQ ID NO: 146 | HUMAN PROTEIN SEQUENCE |
| hR26-005.6 | SEQ ID NO: 147 | HUMAN mRNA SEQUENCE |
| hP26-005.6 | SEQ ID NO: 148 | HUMAN PROTEIN SEQUENCE |
| hR26-005.7 | SEQ ID NO: 149 | HUMAN mRNA SEQUENCE |
| hP26-005.7 | SEQ ID NO: 150 | HUMAN PROTEIN SEQUENCE |
| mD26-009 | SEQ ID NO: 151 | MOUSE GENOMIC SEQUENCE |
| mR26-009.1 | SEQ ID NO: 152 | MOUSE mRNA SEQUENCE |
| mP26-009.1 | SEQ ID NO: 153 | MOUSE PROTEIN SEQUENCE |
| hD26-009 | SEQ ID NO: 154 | HUMAN GENOMIC SEQUENCE |
| hR26-009.1 | SEQ ID NO: 155 | HUMAN mRNA SEQUENCE |
| hP26-009.1 | SEQ ID NO: 156 | HUMAN PROTEIN SEQUENCE |
| hR26-009.2 | SEQ ID NO: 157 | HUMAN mRNA SEQUENCE |
| hP26-009.2 | SEQ ID NO: 158 | HUMAN PROTEIN SEQUENCE |
| hR26-009.3 | SEQ ID NO: 159 | HUMAN mRNA SEQUENCE |
| hP26-009.3 | SEQ ID NO: 160 | HUMAN PROTEIN SEQUENCE |
| hR26-009.4 | SEQ ID NO: 161 | HUMAN mRNA SEQUENCE |
| hP26-009.4 | SEQ ID NO: 162 | HUMAN PROTEIN SEQUENCE |
| hR26-009.5 | SEQ ID NO: 163 | HUMAN mRNA SEQUENCE |
| hP26-009.5 | SEQ ID NO: 164 | HUMAN PROTEIN SEQUENCE |
| hR26-009.6 | SEQ ID NO: 165 | HUMAN mRNA SEQUENCE |
| hP26-009.6 | SEQ ID NO: 166 | HUMAN PROTEIN SEQUENCE |
| mD26-013 | SEQ ID NO: 167 | MOUSE GENOMIC SEQUENCE |
| mR26-013.1 | SEQ ID NO: 168 | MOUSE mRNA SEQUENCE |
| mP26-013.1 | SEQ ID NO: 169 | MOUSE PROTEIN SEQUENCE |
| hD26-013 | SEQ ID NO: 170 | HUMAN GENOMIC SEQUENCE |
| hR26-013.1 | SEQ ID NO: 171 | HUMAN mRNA SEQUENCE |
| hP26-013.1 | SEQ ID NO: 172 | HUMAN PROTEIN SEQUENCE |
| hR26-013.2 | SEQ ID NO: 173 | HUMAN mRNA SEQUENCE |
| hP26-013.2 | SEQ ID NO: 174 | HUMAN PROTEIN SEQUENCE |

[0311] The CA sequences were analyzed by Panther™ (Molecular Diagnostics, Palo Alto, Calif.) software designed to detect homologs and enable prediction of molecular function through a system for protein functional classification. Human Gene Ontlogy annotations were prepared in accordance with the Gene Ontology Consortium (Gene Ontology: tool for the unification of biology. The Gene Ontology Consortium Nature Genet. 25: 25-29 (2000)). Similar analysis was carried out by determining IPR information regarding the CA polypeptides from InterPro, which is an integrated documentation resource for protein families, domains and functional sites (Apweiler at al. Bioinformatics 16(12): 1145-1150 (2000)).

[0312] The CA sequences may be classified according to the following predicted general classifications of function by Panther™ analysis, human gene ontology and IPR domain information for polypeptides having SEQ ID NOS: 6, 12, 14, 20, 28, 30, 36, 38, 40, 46, 52, 54, 56, 62, 64, 66, 68, 70, 72, 74, 76, 84, 90, 92, 94, 96, 98, 100, 102, 104, 106, 108, 114, 116, 118, 124, 130, 138, 140, 142, 144, 146, 148, 150, 156, 158, 160, 162, 164, 166, 172, and 174 as shown in Tables 1-16. The classifications are shown in Table 18 below.

TABLE 18

| Human | | |
|---|---|---|
| Protein | SEQ ID NO: | FUNCTION |
| hP24-004.1 | SEQ ID NO: 6 | HUMAN PANTHER CLASSIFICATIONS |
| | | FAMILY (SUBFAMILY) |
| | | TRANSFORMING GROWTH FACTOR |
| | | BETA-RELATED (Unassigned) |
| | | BIOLOGICAL PROCESS |
| | | Biological process |
| | | unclassified (2.99.00.00.00) |
| | | MOLECULAR FUNCTIONS |
| | | Molecular function |
| | | unclassified (1.97.00.00.00) |
| | | HUMAN GENE ONTOLOGY |
| | | BIOLOGICAL PROCESS |
| | | transmembrane receptor protein |
| | | serine/threonine kinase signaling pathway > |
| | | TGFbeta receptor signaling pathway |
| | | oocyte construction > axis determination |
| | | cell communication > cell-cell signaling |
| | | GO biological process > developmental |
| | | processes |
| | | MOLECULAR FUNCTION |
| | | ligand binding or carrier > protein binding |
| | | CELL COMPONENT |
| | | GO cellular component > extracellular |
| | | HUMAN PROTEIN DOMAINS (INTERPRO |
| | | SIGNATURES) |
| | | IPR003942 (TGFBETA4) |
| | | IPR001839 (TGFB) |
| | | IPR001111 (TGFb propeptide) |
| | | IPR001839 (TGF-beta) |
| | | IPR001839 (TGF BETA 2) |
| | | IPR001839 (sp Q64280 TGF4 MOUSE) |
| hP24-006.1 | SEQ ID NO: 12 | HUMAN PANTHER CLASSIFICATIONS |
| | | FAMILY (SUBFAMILY) |
| | | TRANSFORMING GROWTH FACTOR |
| | | BETA-RELATED (TRANSFORMING GROWTH |
| | | FACTOR BETA 2) |
| | | BIOLOGICAL PROCESS |
| | | Signal transduction (2.11.00.00.00) > Cell |
| | | surface receptor mediated signal |
| | | transduction (2.11.01.00.00) > Receptor protein serine/ |
| | | threonine kinase signaling |
| | | pathway (2.11.01.04.00) |
| | | MOLECULAR FUNCTIONS |
| | | Signaling molecule (1.02.00.00.00) > |
| | | Cytokine (1.02.01.00.00) |
| | | HUMAN GENE ONTOLOGY |
| | | BIOLOGICAL PROCESS |
| | | cell communication > cell-cell signaling |
| | | cell growth and maintenance > cell |
| | | proliferation |
| | | mesoderm development > lymph gland |
| | | development |
| | | cell death > necrosis |
| | | muscle development > myogenesis |
| | | MOLECULAR FUNCTION |
| | | GO molecular function > cell cycle |
| | | regulator |
| | | ligand binding or carrier > protein binding |
| | | CELL COMPONENT |
| | | GO cellular component > extracellular |
| | | extracellular > extracellular space |
| | | HUMAN PROTEIN DOMAINS (INTERPRO |
| | | SIGNATURES) |
| | | IPR003940 (TGFBETA2) |
| | | IPR003911 (TGFBETA) |
| | | IPR001839 (TGFB) |
| | | IPR001111 (TGFb propeptide) |
| | | IPR001839 (TGF-beta) |
| | | IPR001839 (TGF BETA 2) |
| | | IPR001839 (sp P09858 TGF2 PIG) |
| hP24-006.2 | SEQ ID NO: 14 | HUMAN PANTHER CLASSIFICATIONS |
| | | FAMILY (SUBFAMILY) |
| | | TRANSFORMING GROWTH FACTOR |
| | | BETA-RELATED (TRANSFORMING GROWTH |
| | | FACTOR BETA 2) |
| | | BIOLOGICAL PROCESS |
| | | Signal transduction (2.11.00.00.00) > Cell |
| | | surface receptor mediated signal |
| | | transduction (2.11.01.00.00) > Receptor protein |
| | | serine/threonine kinase signaling |
| | | pathway (2.11.01.04.00) |
| | | MOLECULAR FUNCTIONS |
| | | Signaling molecule (1.02.00.00.00) > |
| | | Cytokine (1.02.01.00.00) |
| | | HUMAN GENE ONTOLOGY |
| | | BIOLOGICAL PROCESS |
| | | cell communication > cell-cell signaling |
| | | cell growth and maintenance > cell |
| | | proliferation |
| | | cell death > necrosis |
| | | mesoderm development > lymph gland |
| | | development |
| | | muscle development > myogenesis |
| | | MOLECULAR FUNCTION |
| | | GO molecular function > cell cycle |
| | | regulator |
| | | ligand binding or carrier > protein binding |
| | | CELL COMPONENT |
| | | GO cellular component > extracellular |
| | | extracellular > extracellular space |
| | | HUMAN PROTEIN DOMAINS (INTERPRO |
| | | SIGNATURES) |
| | | IPR003940 (TGFBETA2) |
| | | IPR003911 (TGFBETA) |
| | | IPR001839 (TGFB) |
| | | IPR001111 (TGFb propeptide) |
| | | IPR001839 (TGF-beta) |
| | | IPR001839 (TGF BETA 2) |
| | | IPR001839 (sp P09858 TGF2 PIG) |
| hP24-009.1 | SEQ ID NO: 20 | HUMAN PANTHER CLASSIFICATIONS |
| | | FAMILY (SUBFAMILY) |
| | | PLEXIN DOMAIN-CONTAINING |
| | | RECEPTOR (PLEXIN) |
| | | HUMAN GENE ONTOLOGY |
| | | BIOLOGICAL PROCESS |
| | | cell communication > signal transduction |
| | | MOLECULAR FUNCTION |
| | | glucosidase > mannosyl-oligosaccharide |
| | | glucosidase (processing A-glucosidase I) |
| | | CELL COMPONENT |
| | | cell > membrane fraction |
| | | HUMAN PROTEIN DOMAINS (INTERPRO |
| | | SIGNATURES) |
| | | IPR002909 (IPT) |
| | | IPR003659 (PSI) |
| | | IPR001627 (Sema) |
| | | IPR002909 (TIG) |
| | | IPR002165 (PSI) |
| hP25-006.1 | SEQ ID NO: 28 | HUMAN PANTHER CLASSIFICATIONS |
| | | FAMILY (SUBFAMILY) |
| | | VOLTAGE-DEPENDENT CALCIUM |
| | | CHANNEL BETA SUBUNIT (VOLTAGE- |
| | | DEPENDENT CALCIUM CHANNEL BETA-4) |
| | | BIOLOGICAL PROCESS |
| | | Transport (2.15.00.00.00) > Ion |
| | | transport (2.15.01.00.00) > Cation |
| | | transport (2.15.01.01.00) |
| | | MOLECULAR FUNCTIONS |
| | | Ion channel (1.03.00.00.00) > Voltage-gated |
| | | ion channel (1.03.03.00.00) > Voltage-gated |
| | | calcium channel (1.03.03.02.00) |
| | | HUMAN GENE ONTOLOGY |
| | | BIOLOGICAL PROCESS |
| | | di-, tri-valent inorganic cation transport > |
| | | calcium ion transport |
| | | transport > ion transport |
| | | muscle development > neuromuscular |
| | | junction development |
| | | cell motility > muscle contraction |
| | | peptidoglycan catabolism > mRNA splicing |
| | | transcription from Pol II promoter > mRNA |
| | | splicing |
| | | MOLECULAR FUNCTION |
| | | RNA dependent adenosinetriphosphatase > |
| | | ATP dependent RNA helicase |
| | | ATP dependent helicase > ATP dependent |
| | | RNA helicase |
| | | RNA helicase > ATP dependent RNA |
| | | helicase |
| | | CELL COMPONENT |
| | | cell > membrane fraction |
| | | nucleus > spliceosome |
| | | integral plasma membrane protein > |
| | | voltage-gated calcium channel |
| | | HUMAN PROTEIN DOMAINS (INTERPRO |
| | | SIGNATURES) |
| | | IPR000584 (LCACHANNELB) |
| | | IPR000619 (GuKc) |
| | | IPR001452 (SH3) |
| | | IPR000584 (Ca channel B) |
| | | IPR001452 (SH3) |
| hP25-006.2 | SEQ ID NO: 30 | HUMAN PANTHER CLASSIFICATIONS |
| | | FAMILY (SUBFAMILY) |
| | | VOLTAGE-DEPENDENT CALCIUM |
| | | CHANNEL BETA SUBUNIT (VOLTAGE- |
| | | DEPENDENT CALCIUM CHANNEL BETA-4) |
| | | BIOLOGICAL PROCESS |
| | | Transport (2.15.00.00.00) > Ion |
| | | transport (2.15.01.00.00) > Cation |
| | | transport (2.15.01.01.00) |
| | | MOLECULAR FUNCTIONS |
| | | Ion channel (1.03.00.00.00) > Voltage-gated |
| | | ion channel (1.03.03.00.00) > Voltage-gated |
| | | calcium channel (1.03.03.02.00) |
| | | HUMAN GENE ONTOLOGY |
| | | BIOLOGICAL PROCESS |
| | | di-, tri-valent inorganic cation transport > |
| | | calcium ion transport |
| | | peptidoglycan catabolism > mRNA splicing |
| | | transcription from Pol II promoter > mRNA |
| | | splicing |
| | | cell motility > muscle contraction |
| | | muscle development > neuromuscular |
| | | junction development |
| | | transport > ion transport |
| | | MOLECULAR FUNCTION |
| | | RNA dependent adenosinetriphosphatase > |
| | | ATP dependent RNA helicase |
| | | ATP dependent helicase > ATP dependent |
| | | RNA helicase |
| | | RNA helicase > ATP dependent RNA |
| | | helicase |
| | | CELL COMPONENT |
| | | cell > membrane fraction |
| | | nucleus > spliceosome |
| | | integral plasma membrane protein > |
| | | voltage-gated calcium channel |
| | | HUMAN PROTEIN DOMAINS (INTERPRO |
| | | SIGNATURES) |
| | | IPR000584 (LCACHANNELB) |
| | | IPR000619 (GuKc) |
| | | IPR001452 (SH3) |
| | | IPR000584 (Ca channel B) |
| | | IPR001452 (SH3) |
| hP25-007.1 | SEQ ID NO: 36 | HUMAN PANTHER CLASSIFICATIONS |
| | | FAMILY (SUBFAMILY) |
| | | SECRETORY PHOSPHOLIPASE A2 |
| | | RECEPTOR-RELATED (SECRETORY |
| | | PHOSPHOLIPASE A2 RECEPTOR) |
| | | BIOLOGICAL PROCESS |
| | | Biological process |
| | | unclassified (2.99.00.00.00) |
| | | MOLECULAR FUNCTIONS |
| | | Receptor (1.01.00.00.00) > Other |
| | | receptor (1.01.99.00.00) |
| | | HUMAN GENE ONTOLOGY |
| | | BIOLOGICAL PROCESS |
| | | defence response > inflammatory response |
| | | macromolecule catabolism > proteolysis |
| | | and peptidolysis |
| | | cell communication > cell adhesion |
| | | MOLECULAR FUNCTION |
| | | metalloendopeptidase > gelatinase A |
| | | peptidase > metallopeptidase |
| | | metalloendopeptidase > gelatinase B |
| | | collagenase > interstitial collagenase |
| | | collagenase > neutrophil collagenase |
| | | CELL COMPONENT |
| | | cell > membrane fraction |
| | | plasma membrane > integral plasma |
| | | membrane protein |
| | | extracellular > extracellular space |
| | | extracellular > extracellular matrix |
| | | HUMAN PROTEIN DOMAINS (INTERPRO |
| | | SIGNATURES) |
| | | IPR000562 (FNTYPEII) |
| | | IPR001304 (CLECT) |
| | | IPR000562 (FN2) |
| | | IPR000772 (RICIN) |
| | | IPR000562 (fn2) |
| | | IPR001304 (lectin c) |
| | | IPR000772 (Ricin B lectin) |
| | | IPR001304 (C TYPE LECTIN 2 8) |
| | | IPR000772 (RICIN B LECTIN) |
| | | IPR000562 (sp Q13018 Q13018 HUMAN) |
| hP25-007.2 | SEQ ID NO: 38 | HUMAN PANTHER CLASSIFICATIONS |
| | | FAMILY (SUBFAMILY) |
| | | SECRETORY PHOSPHOLIPASE A2 |
| | | RECEPTOR-RELATED (SECRETORY |
| | | PHOSPHOLIPASE A2 RECEPTOR) |
| | | BIOLOGICAL PROCESS |
| | | Biological process |
| | | unclassified (2.99.00.00.00) |
| | | MOLECULAR FUNCTIONS |
| | | Receptor (1.01.00.00.00) > Other |
| | | receptor (1.01.99.00.00) |
| | | HUMAN GENE ONTOLOGY |
| | | BIOLOGICAL PROCESS |
| | | defence response > inflammatory response |
| | | macromolecule catabolism > proteolysis |
| | | and peptidolysis |
| | | cell communication > cell adhesion |
| | | MOLECULAR FUNCTION |
| | | metalloendopeptidase > gelatinase A |
| | | peptidase > metallopeptidase |
| | | metalloendopeptidase > gelatinase B |
| | | collagenase > interstitial collagenase |
| | | collagenase > neutrophil collagenase |
| | | CELL COMPONENT |
| | | cell > membrane fraction |
| | | plasma membrane > integral plasma |
| | | membrane protein |
| | | extracellular > extracellular space |
| | | extracellular > extracellular matrix |
| | | HUMAN PROTEIN DOMAINS (INTERPRO |
| | | SIGNATURES) |
| | | IPR000562 (FNTYPEII) |
| | | IPR001304 (CLECT) |
| | | IPR000562 (FN2) |
| | | IPR000772 (RICIN) |
| | | IPR000562 (fn2) |
| | | IPR001304 (lectin c) |
| | | IPR000772 (Ricin B lectin) |
| | | IPR001304 (C TYPE LECTIN 2 8) |
| | | IPR000772 (RICIN B LECTIN) |
| | | IPR000562 (sp Q13018 Q13018 HUMAN) |
| hP25-007.3 | SEQ ID NO: 40 | HUMAN PANTHER CLASSIFICATIONS |
| | | FAMILY (SUBFAMILY) |
| | | SECRETORY PHOSPHOLIPASE A2 |
| | | RECEPTOR-RELATED (SECRETORY |
| | | PHOSPHOLIPASE A2 RECEPTOR) |
| | | BIOLOGICAL PROCESS |
| | | Biological process |
| | | unclassified (2.99.00.00.00) |
| | | MOLECULAR FUNCTIONS |
| | | Receptor (1.01.00.00.00) > Other |
| | | receptor (1.01.99.00.00) |
| | | HUMAN GENE ONTOLOGY |
| | | BIOLOGICAL PROCESS |
| | | defence response > inflammatory response |
| | | macromolecule catabolism > proteolysis |
| | | and peptidolysis |
| | | cell communication > cell adhesion |
| | | MOLECULAR FUNCTION |
| | | metalloendopeptidase > gelatinase A |
| | | peptidase > metallopeptidase |
| | | metalloendopeptidase > gelatinase B |
| | | collagenase > interstitial collagenase |
| | | collagenase > neutrophil collagenase |
| | | CELL COMPONENT |
| | | cell > membrane fraction |
| | | plasma membrane > integral plasma |
| | | membrane protein |
| | | extracellular > extracellular space |
| | | extracellular > extracellular matrix |
| | | HUMAN PROTEIN DOMAINS (INTERPRO |
| | | SIGNATURES) |
| | | IPR000562 (FNTYPEII) |
| | | IPR001304 (CLECT) |
| | | IPR000562 (FN2) |
| | | IPR000772 (RICIN) |
| | | IPR000562 (fn2) |
| | | IPR001304 (lectin c) |
| | | IPR000772 (Ricin B lectin) |
| | | IPR001304 (C TYPE LECTIN 2 8) |
| | | IPR000772 (RICIN B LECTIN) |
| | | IPR000562 (sp Q13018 Q13018 HUMAN) |
| hP25-008.1 | SEQ ID NO: 46 | HUMAN PANTHER CLASSIFICATIONS |
| | | FAMILY (SUBFAMILY) |
| | | AMINO ACID TRANSPORTER- |
| | | RELATED (gb def: (ae003835) cg13743 gene |
| | | product [drosophila melanogaster]) |
| | | BIOLOGICAL PROCESS |
| | | Amino acid metabolism (2.02.00.00.00) |
| | | Transport (2.15.00.00.00) > Amino acid |
| | | transport (2.15.05.00.00) |
| | | MOLECULAR FUNCTIONS |
| | | Transporter (1.10.00.00.00) > Other |
| | | transporter (1.10.99.00.00) |
| | | HUMAN GENE ONTOLOGY |
| | | No Gene Ontology |
| | | HUMAN PROTEIN DOMAINS (INTERPRO |
| | | SIGNATURES) |
| | | IPR002422 (AROMATIC AA PERM 2) |
| hP25-009.1 | SEQ ID NO: 52 | HUMAN PANTHER CLASSIFICATIONS |
| | | FAMILY (SUBFAMILY) |
| | | MITOCHONDRIAL CARRIER |
| | | PROTEIN (MITOCHONDRIAL CARRIER |
| | | PROTEIN) |
| | | BIOLOGICAL PROCESS |
| | | Transport (2.15.00.00.00) > Small molecule |
| | | transport (2.15.02.00.00) |
| | | MOLECULAR FUNCTIONS |
| | | Transfer/carrier protein (1.11.00.00.00) > |
| | | Mitochondrial carrier protein (1.11.02.00.00) |
| | | HUMAN GENE ONTOLOGY |
| | | No Gene Ontology |
| | | HUMAN PROTEIN DOMAINS (INTERPRO |
| | | SIGNATURES) |
| | | IPR002048 (EFh) |
| | | IPR001993 (mito carr) |
| | | IPR002048 (efhand) |
| | | IPR002048 (EF HAND 2) |
| hP25-009.2 | SEQ ID NO: 54 | HUMAN PANTHER CLASSIFICATIONS |
| | | FAMILY (SUBFAMILY) |
| | | MITOCHONDRIAL CARRIER |
| | | PROTEIN (MITOCHONDRIAL CARRIER |
| | | PROTEIN) |
| | | BIOLOGICAL PROCESS |
| | | Transport (2.15.00.00.00) > Small molecule |
| | | transport (2.15.02.00.00) |
| | | MOLECULAR FUNCTIONS |
| | | Transfer/carrier protein (1.11.00.00.00) > |
| | | Mitochondrial carrier protein (1.11.02.00.00) |
| | | HUMAN GENE ONTOLOGY |
| | | No Gene Ontology |
| | | HUMAN PROTEIN DOMAINS (INTERPRO |
| | | SIGNATURES) |
| | | IPR001993 (mito carr) |
| hP25-009.3 | SEQ ID NO: 56 | HUMAN PANTHER CLASSIFICATIONS |
| | | FAMILY (SUBFAMILY) |
| | | MITOCHONDRIAL CARRIER |
| | | PROTEIN (MITOCHONDRIAL CARRIER |
| | | PROTEIN) |
| | | BIOLOGICAL PROCESS |
| | | Transport (2.15.00.00.00) > Small molecule |
| | | transport (2.15.02.00.00) |
| | | MOLECULAR FUNCTIONS |
| | | Transfer/carrier protein (1.11.00.00.00) > |
| | | Mitochondrial carrier protein (1.11.02.00.00) |
| | | HUMAN GENE ONTOLOGY |
| | | No Gene Ontology |
| | | HUMAN PROTEIN DOMAINS (INTERPRO |
| | | SIGNATURES) |
| | | IPR002048 (EFh) |
| | | IPR001993 (mito carr) |
| | | IPR002048 (efhand) |
| | | IPR002048 (EF HAND 2) |
| hP25-013.1 | SEQ ID NO: 62 | HUMAN PANTHER CLASSIFICATIONS |
| | | FAMILY (SUBFAMILY) |
| | | CANCER OVEREXPRESSED |
| | | GENE (EMBRYONIC EPITHELIA PROTEIN) |
| | | BIOLOGICAL PROCESS |
| | | Biological process unknown (2.97.00.00.00) |
| | | MOLECULAR FUNCTIONS |
| | | Molecular function unknown (1.99.00.00.00) |
| | | HUMAN GENE ONTOLOGY |
| | | BIOLOGICAL PROCESS |
| | | defence response > inflammatory response |
| | | MOLECULAR FUNCTION |
| | | sugar binding > lectin |
| | | CELL COMPONENT |
| | | nuclear membrane > nuclear membrane |
| | | lumen |
| | | plasma membrane > integral plasma |
| | | membrane protein |
| | | HUMAN PROTEIN DOMAINS (INTERPRO |
| | | SIGNATURES) |
| | | No Domain Hit |
| hP25-013.2 | SEQ ID NO: 64 | HUMAN PANTHER CLASSIFICATIONS |
| | | FAMILY (SUBFAMILY) |
| | | CANCER OVEREXPRESSED |
| | | GENE (EMBRYONIC EPITHELIA PROTEIN) |
| | | BIOLOGICAL PROCESS |
| | | Biological process unknown (2.97.00.00.00) |
| | | MOLECULAR FUNCTIONS |
| | | Molecular function unknown (1.99.00.00.00) |
| | | HUMAN GENE ONTOLOGY |
| | | BIOLOGICAL PROCESS |
| | | defence response > inflammatory response |
| | | MOLECULAR FUNCTION |
| | | sugar binding > lectin |
| | | CELL COMPONENT |
| | | nuclear membrane > nuclear membrane |
| | | lumen |
| | | plasma membrane > integral plasma |
| | | membrane protein |
| | | HUMAN PROTEIN DOMAINS (INTERPRO |
| | | SIGNATURES) |
| | | No Domain Hit |
| hP25-013.3 | SEQ ID NO: 66 | HUMAN PANTHER CLASSIFICATIONS |
| | | FAMILY (SUBFAMILY) |
| | | CANCER OVEREXPRESSED |
| | | GENE (EMBRYONIC EPITHELIA PROTEIN) |
| | | BIOLOGICAL PROCESS |
| | | Biological process unknown (2.97.00.00.00) |
| | | MOLECULAR FUNCTIONS |
| | | Molecular function unknown (1.99.00.00.00) |
| | | HUMAN GENE ONTOLOGY |
| | | BIOLOGICAL PROCESS |
| | | defence response > inflammatory response |
| | | MOLECULAR FUNCTION |
| | | sugar binding > lectin |
| | | CELL COMPONENT |
| | | nuclear membrane > nuclear membrane |
| | | lumen |
| | | plasma membrane > integral plasma |
| | | membrane protein |
| | | HUMAN PROTEIN DOMAINS (INTERPRO |
| | | SIGNATURES) |
| | | No Domain Hit |
| hP25-013.4 | SEQ ID NO: 68 | HUMAN PANTHER CLASSIFICATIONS |
| | | FAMILY (SUBFAMILY) |
| | | CANCER OVEREXPRESSED |
| | | GENE (EMBRYONIC EPITHELIA PROTEIN) |
| | | BIOLOGICAL PROCESS |
| | | Biological process unknown (2.97.00.00.00) |
| | | MOLECULAR FUNCTIONS |
| | | Molecular function unknown (1.99.00.00.00) |
| | | HUMAN GENE ONTOLOGY |
| | | BIOLOGICAL PROCESS |
| | | defence response > inflammatory response |
| | | MOLECULAR FUNCTION |
| | | sugar binding > lectin |
| | | CELL COMPONENT |
| | | nuclear membrane > nuclear membrane |
| | | lumen |
| | | plasma membrane > integral plasma |
| | | membrane protein |
| | | HUMAN PROTEIN DOMAINS (INTERPRO |
| | | SIGNATURES) |
| | | No Domain Hit |
| hP25-013.5 | SEQ ID NO: 70 | HUMAN PANTHER CLASSIFICATIONS |
| | | FAMILY (SUBFAMILY) |
| | | NOT ANNOTATED (NOT ANNOTATED) |
| | | BIOLOGICAL PROCESS |
| | | Biological process |
| | | unclassified (2.99.00.00.00) |
| | | MOLECULAR FUNCTIONS |
| | | Molecular function |
| | | unclassified (1.97.00.00.00) |
| | | HUMAN GENE ONTOLOGY |
| | | No Gene Ontology |
| | | HUMAN PROTEIN DOMAINS (INTERPRO |
| | | SIGNATURES) |
| | | No Domain Hit |
| hP25-013.6 | SEQ ID NO: 72 | HUMAN PANTHER CLASSIFICATIONS |
| | | FAMILY (SUBFAMILY) |
| | | CANCER OVEREXPRESSED |
| | | GENE (EMBRYONIC EPITHELIA PROTEIN) |
| | | BIOLOGICAL PROCESS |
| | | Biological process unknown (2.97.00.00.00) |
| | | MOLECULAR FUNCTIONS |
| | | Molecular function unknown (1.99.00.00.00) |
| | | HUMAN GENE ONTOLOGY |
| | | BIOLOGICAL PROCESS |
| | | defence response > inflammatory response |
| | | MOLECULAR FUNCTION |
| | | sugar binding > lectin |
| | | CELL COMPONENT |
| | | nuclear membrane > nuclear membrane |
| | | lumen |
| | | plasma membrane > integral plasma |
| | | membrane protein |
| | | HUMAN PROTEIN DOMAINS (INTERPRO |
| | | SIGNATURES) |
| | | No Domain Hit |
| hP25-013.7 | SEQ ID NO: 74 | HUMAN PANTHER CLASSIFICATIONS |
| | | FAMILY (SUBFAMILY) |
| | | CANCER OVEREXPRESSED |
| | | GENE (EMBRYONIC EPITHELIA PROTEIN) |
| | | BIOLOGICAL PROCESS |
| | | Biological process unknown (2.97.00.00.00) |
| | | MOLECULAR FUNCTIONS |
| | | Molecular function unknown (1.99.00.00.00) |
| | | HUMAN GENE ONTOLOGY |
| | | BIOLOGICAL PROCESS |
| | | defence response > inflammatory response |
| | | isoprenoid catabolism > nitrogen |
| | | metabolism |
| | | cell death > apoptosis |
| | | defence response > immune response |
| | | MOLECULAR FUNCTION |
| | | sugar binding > lectin |
| | | CELL COMPONENT |
| | | plasma membrane > integral plasma |
| | | membrane protein |
| | | GO cellular component > extracellular |
| | | HUMAN PROTEIN DOMAINS (INTERPRO |
| | | SIGNATURES) |
| | | IPR002352 (EMAJORBASICP) |
| | | IPR001304 (CLECT) |
| | | IPR001304 (lectin c) |
| | | IPR001304 (C TYPE LECTIN 2) |
| hP25-013.8 | SEQ ID NO: 76 | HUMAN PANTHER CLASSIFICATIONS |
| | | FAMILY (SUBFAMILY) |
| | | CANCER OVEREXPRESSED |
| | | GENE (EMBRYONIC EPITHELIA PROTEIN) |
| | | BIOLOGICAL PROCESS |
| | | Biological process unknown (2.97.00.00.00) |
| | | MOLECULAR FUNCTIONS |
| | | Molecular function unknown (1.99.00.00.00) |
| | | HUMAN GENE ONTOLOGY |
| | | BIOLOGICAL PROCESS |
| | | defence response > inflammatory response |
| | | isoprenoid catabolism > nitrogen |
| | | metabolism |
| | | cell death > apoptosis |
| | | defence response > immune response |
| | | MOLECULAR FUNCTION |
| | | sugar binding > lectin |
| | | CELL COMPONENT |
| | | plasma membrane > integral plasma |
| | | membrane protein |
| | | GO cellular component > extracellular |
| | | HUMAN PROTEIN DOMAINS (INTERPRO |
| | | SIGNATURES) |
| | | IPR002352 (EMAJORBASICP) |
| | | IPR001304 (CLECT) |
| | | IPR001304 (lectin c) |
| | | IPR001304 (C TYPE LECTIN 2) |
| hP25-015.1 | SEQ ID NO: 84 | HUMAN PANTHER CLASSIFICATIONS |
| | | FAMILY (SUBFAMILY) |
| | | LEUCINE-RICH REPEAT PROTEIN- |
| | | RELATED (CHONDROADHERIN-RELATED) |
| | | BIOLOGICAL PROCESS |
| | | Biological process unknown (2.97.00.00.00) |
| | | MOLECULAR FUNCTIONS |
| | | Molecular function |
| | | unclassified (1.97.00.00.00) |
| | | HUMAN GENE ONTOLOGY |
| | | BIOLOGICAL PROCESS |
| | | cell communication > cell adhesion |
| | | MOLECULAR FUNCTION |
| | | GO molecular function > cell adhesion |
| | | CELL COMPONENT |
| | | cell > plasma membrane |
| | | HUMAN PROTEIN DOMAINS (INTERPRO |
| | | SIGNATURES) |
| | | IPR001611 (LEURICHRPT) |
| | | IPR003596 (IGv) |
| | | NULL (LRR PS) |
| | | IPR003598 (IGc2) |
| | | IPR000372 (LRRNT) |
| | | IPR003599 (IG) |
| | | IPR003591 (LRR TYP) |
| | | IPR001611 (LRR) |
| | | IPR000372 (LRRNT) |
| | | IPR003006 (ig) |
| | | IPR000483 (LRRCT) |
| | | NULL (THR RICH) |
| hP25-017.1 | SEQ ID NO: 90 | HUMAN PANTHER CLASSIFICATIONS |
| | | FAMILY (SUBFAMILY) |
| | | CD44 ANTIGEN (CD44 ANTIGEN) |
| | | BIOLOGICAL PROCESS |
| | | Signal transduction (2.11.00.00.00) > Cell |
| | | communication (2.11.03.00.00) > Cell adhesion- |
| | | mediated signaling (2.11.03.01.00) |
| | | Signal transduction (2.11.00.00.00) > |
| | | Intracellular signaling cascade (2.11.02.00.00) > |
| | | Calcium mediated signaling (2.11.02.02.00) > |
| | | MAPKKK cascade (2.11.02.03.00) |
| | | Immunity and defense (2.16.00.00.00) > B- |
| | | cell- and antibody-mediated |
| | | immunity (2.16.02.00.00) |
| | | Immunity and defense (2.16.00.00.00) > |
| | | Macrophage-mediated immunity (2.16.05.00.00) |
| | | Immunity and defense (2.16.00.00.00) > T- |
| | | cell mediated immunity (2.16.01.00.00) |
| | | Oncogenesis (2.17.00.00.00) > Other |
| | | oncogenesis (2.17.99.00.00) |
| | | Apoptosis (2.26.00.00.00) > Inhibition of |
| | | apoptosis (2.26.03.00.00) |
| | | Cell structure and motility (2.27.00.00.00) > |
| | | Cell motility (2.27.02.00.00) |
| | | Cell adhesion (2.29.00.00.00) |
| | | MOLECULAR FUNCTIONS |
| | | Receptor (1.01.00.00.00) > Other |
| | | receptor (1.01.99.00.00) |
| | | HUMAN GENE ONTOLOGY |
| | | BIOLOGICAL PROCESS |
| | | cell communication > cell adhesion |
| | | stress response > defence response |
| | | MOLECULAR FUNCTION |
| | | glycosaminoglycan binding > hyaluronic |
| | | acid binding |
| | | transmembrane receptor > cell adhesion |
| | | receptor |
| | | cell adhesion > cell adhesion receptor |
| | | molecular_function unknown > lymphocyte |
| | | antigen |
| | | CELL COMPONENT |
| | | cell > membrane fraction |
| | | cell > plasma membrane |
| | | extracellular > extracellular matrix |
| | | integral plasma membrane protein > integral |
| | | plasma membrane proteoglycan |
| | | HUMAN PROTEIN DOMAINS (INTERPRO |
| | | SIGNATURES) |
| | | IPR001231 (CD44) |
| | | IPR000538 (LINKMODULE) |
| | | IPR000538 (LINK) |
| | | IPR000538 (Xlink) |
| | | IPR000538 (sp Q92493 Q92493 HUMAN) |
| hP25-017.2 | SEQ ID NO: 92 | HUMAN PANTHER CLASSIFICATIONS |
| | | FAMILY (SUBFAMILY) |
| | | CD44 ANTIGEN (CD44 ANTIGEN) |
| | | BIOLOGICAL PROCESS |
| | | Signal transduction (2.11.00.00.00) > Cell |
| | | communication (2.11.03.00.00) > Cell adhesion- |
| | | mediated signaling (2.11.03.01.00) |
| | | Signal transduction (2.11.00.00.00) > |
| | | Intracellular signaling cascade (2.11.02.00.00) > |
| | | Calcium mediated signaling (2.11.02.02.00) > |
| | | MAPKKK cascade (2.11.02.03.00) |
| | | Immunity and defense (2.16.00.00.00) > B- |
| | | cell- and antibody-mediated |
| | | immunity (2.16.02.00.00) |
| | | Immunity and defense (2.16.00.00.00) > |
| | | Macrophage-mediated immunity (2.16.05.00.00) |
| | | Immunity and defense (2.16.00.00.00) > T- |
| | | cell mediated immunity (2.16.01.00.00) |
| | | Oncogenesis (2.17.00.00.00) > Other |
| | | oncogenesis (2.17.99.00.00) |
| | | Apoptosis (2.26.00.00.00) > Inhibition of |
| | | apoptosis (2.26.03.00.00) |
| | | Cell structure and motility (2.27.00.00.00) > |
| | | Cell motility (2.27.02.00.00) |
| | | Cell adhesion (2.29.00.00.00) |
| | | MOLECULAR FUNCTIONS |
| | | Receptor (1.01.00.00.00) > Other |
| | | receptor (1.01.99.00.00) |
| | | HUMAN GENE ONTOLOGY |
| | | BIOLOGICAL PROCESS |
| | | cell communication > cell adhesion |
| | | stress response > defence response |
| | | MOLECULAR FUNCTION |
| | | glycosaminoglycan binding > hyaluronic |
| | | acid binding |
| | | transmembrane receptor > cell adhesion |
| | | receptor |
| | | cell adhesion > cell adhesion receptor |
| | | molecular_function unknown > lymphocyte |
| | | antigen |
| | | CELL COMPONENT |
| | | cell > membrane fraction |
| | | cell > plasma membrane |
| | | extracellular > extracellular matrix |
| | | integral plasma membrane protein > integral |
| | | plasma membrane proteoglycan |
| | | HUMAN PROTEIN DOMAINS (INTERPRO |
| | | SIGNATURES) |
| | | IPR001231 (CD44) |
| | | IPR000538 (LINKMODULE) |
| | | IPR000538 (LINK) |
| | | IPR000538 (Xlink) |
| | | IPR000538 (sp Q92493 Q92493 HUMAN) |
| hP25-017.3 | SEQ ID NO: 94 | HUMAN PANTHER CLASSIFICATIONS |
| | | FAMILY (SUBFAMILY) |
| | | CD44 ANTIGEN (CD44 ANTIGEN) |
| | | BIOLOGICAL PROCESS |
| | | Signal transduction (2.11.00.00.00) > Cell |
| | | communication (2.11.03.00.00) > Cell adhesion- |
| | | mediated signaling (2.11.03.01.00) |
| | | Signal transduction (2.11.00.00.00) > |
| | | Intracellular signaling cascade (2.11.02.00.00) > |
| | | Calcium mediated signaling (2.11.02.02.00) > |
| | | MAPKKK cascade (2.11.02.03.00) |
| | | Immunity and defense (2.16.00.00.00) > B- |
| | | cell- and antibody-mediated |
| | | immunity (2.16.02.00.00) |
| | | Immunity and defense (2.16.00.00.00) > |
| | | Macrophage-mediated immunity (2.16.05.00.00) |
| | | Immunity and defense (2.16.00.00.00) > T- |
| | | cell mediated immunity (2.16.01.00.00) |
| | | Oncogenesis (2.17.00.00.00) > Other |
| | | oncogenesis (2.17.99.00.00) |
| | | Apoptosis (2.26.00.00.00) > Inhibition of |
| | | apoptosis (2.26.03.00.00) |
| | | Cell structure and motility (2.27.00.00.00) > |
| | | Cell motility (2.27.02.00.00) |
| | | Cell adhesion (2.29.00.00.00) |
| | | MOLECULAR FUNCTIONS |
| | | Receptor (1.01.00.00.00) > Other |
| | | receptor (1.01.99.00.00) |
| | | HUMAN GENE ONTOLOGY |
| | | BIOLOGICAL PROCESS |
| | | cell communication > cell adhesion |
| | | stress response > defence response |
| | | MOLECULAR FUNCTION |
| | | transmembrane receptor > cell adhesion |
| | | receptor |
| | | cell adhesion > cell adhesion receptor |
| | | glycosaminoglycan binding > hyaluronic |
| | | acid binding |
| | | molecular_function unknown > lymphocyte |
| | | antigen |
| | | CELL COMPONENT |
| | | cell > membrane fraction |
| | | cell > plasma membrane |
| | | extracellular > extracellular matrix |
| | | integral plasma membrane protein > integral |
| | | plasma membrane proteoglycan |
| | | HUMAN PROTEIN DOMAINS (INTERPRO |
| | | SIGNATURES) |
| | | IPR001231 (CD44) |
| | | IPR000538 (LINKMODULE) |
| | | IPR000538 (LINK) |
| | | IPR000538 (Xlink) |
| | | IPR000538 (sp Q92493 Q92493 HUMAN) |
| hP25-017.4 | SEQ ID NO: 96 | HUMAN PANTHER CLASSIFICATIONS |
| | | FAMILY (SUBFAMILY) |
| | | CD44 ANTIGEN (CD44 ANTIGEN) |
| | | BIOLOGICAL PROCESS |
| | | Signal transduction (2.11.00.00.00) > Cell |
| | | communication (2.11.03.00.00) > Cell adhesion- |
| | | mediated signaling (2.11.03.01.00) |
| | | Signal transduction (2.11.00.00.00) > |
| | | Intracellular signaling cascade (2.11.02.00.00) > |
| | | Calcium mediated signaling (2.11.02.02.00) > |
| | | MAPKKK cascade (2.11.02.03.00) |
| | | Immunity and defense (2.16.00.00.00) > B- |
| | | cell- and antibody-mediated |
| | | immunity (2.16.02.00.00) |
| | | Immunity and defense (2.16.00.00.00) > |
| | | Macrophage-mediated immunity (2.16.05.00.00) |
| | | Immunity and defense (2.16.00.00.00) > T- |
| | | cell mediated immunity (2.16.01.00.00) |
| | | Oncogenesis (2.17.00.00.00) > Other |
| | | oncogenesis (2.17.99.00.00) |
| | | Apoptosis (2.26.00.00.00) > Inhibition of |
| | | apoptosis (2.26.03.00.00) |
| | | Cell structure and motility (2.27.00.00.00) > |
| | | Cell motility (2.27.02.00.00) |
| | | Cell adhesion (2.29.00.00.00) |
| | | MOLECULAR FUNCTIONS |
| | | Receptor (1.01.00.00.00) > Other |
| | | receptor (1.01.99.00.00) |
| | | HUMAN GENE ONTOLOGY |
| | | BIOLOGICAL PROCESS |
| | | cell communication > cell adhesion |
| | | stress response > defence response |
| | | MOLECULAR FUNCTION |
| | | glycosaminoglycan binding > hyaluronic |
| | | acid binding |
| | | transmembrane receptor > cell adhesion |
| | | receptor |
| | | cell adhesion > cell adhesion receptor |
| | | molecular_function unknown > lymphocyte |
| | | antigen |
| | | CELL COMPONENT |
| | | cell > membrane fraction |
| | | cell > plasma membrane |
| | | extracellular > extracellular matrix |
| | | integral plasma membrane protein > integral |
| | | plasma membrane proteoglycan |
| | | HUMAN PROTEIN DOMAINS (INTERPRO |
| | | SIGNATURES) |
| | | IPR001231 (CD44) |
| | | IPR000538 (LINKMODULE) |
| | | IPR000538 (LINK) |
| | | IPR000538 (Xlink) |
| | | IPR000538 (sp Q92493 Q92493 HUMAN) |
| hP25-017.5 | SEQ ID NO: 98 | HUMAN PANTHER CLASSIFICATIONS |
| | | FAMILY (SUBFAMILY) |
| | | CD44 ANTIGEN (CD44 ANTIGEN) |
| | | BIOLOGICAL PROCESS |
| | | Signal transduction (2.11.00.00.00) > Cell |
| | | communication (2.11.03.00.00) > Cell adhesion- |
| | | mediated signaling (2.11.03.01.00) |
| | | Signal transduction (2.11.00.00.00) > |
| | | Intracellular signaling cascade (2.11.02.00.00) > |
| | | Calcium mediated signaling (2.11.02.02.00) > |
| | | MAPKKK cascade (2.11.02.03.00) |
| | | Immunity and defense (2.16.00.00.00) > B- |
| | | cell- and antibody-mediated |
| | | immunity (2.16.02.00.00) |
| | | Immunity and defense (2.16.00.00.00) > |
| | | Macrophage-mediated immunity (2.16.05.00.00) |
| | | Immunity and defense (2.16.00.00.00) > T- |
| | | cell mediated immunity (2.16.01.00.00) |
| | | Oncogenesis (2.17.00.00.00) > Other |
| | | oncogenesis (2.17.99.00.00) |
| | | Apoptosis (2.26.00.00.00) > Inhibition of |
| | | apoptosis (2.26.03.00.00) |
| | | Cell structure and motility (2.27.00.00.00) > |
| | | Cell motility (2.27.02.00.00) |
| | | Cell adhesion (2.29.00.00.00) |
| | | MOLECULAR FUNCTIONS |
| | | Receptor (1.01.00.00.00) > Other |
| | | receptor (1.01.99.00.00) |
| | | HUMAN GENE ONTOLOGY |
| | | BIOLOGICAL PROCESS |
| | | cell communication > cell adhesion |
| | | stress response > defence response |
| | | MOLECULAR FUNCTION |
| | | glycosaminoglycan binding > hyaluronic |
| | | acid binding |
| | | transmembrane receptor > cell adhesion |
| | | receptor |
| | | cell adhesion > cell adhesion receptor |
| | | molecular_function unknown > lymphocyte |
| | | antigen |
| | | CELL COMPONENT |
| | | cell > membrane fraction |
| | | cell > plasma membrane |
| | | extracellular > extracellular matrix |
| | | integral plasma membrane protein > integral |
| | | plasma membrane proteoglycan |
| | | HUMAN PROTEIN DOMAINS (INTERPRO |
| | | SIGNATURES) |
| | | IPR001231 (CD44) |
| | | IPR000538 (LINKMODULE) |
| | | IPR000538 (LINK) |
| | | IPR000538 (Xlink) |
| | | IPR000538 (sp Q92493 Q92493 HUMAN) |
| hP25-017.6 | SEQ ID NO: 100 | HUMAN PANTHER CLASSIFICATIONS |
| | | FAMILY (SUBFAMILY) |
| | | CD44 ANTIGEN (CD44 ANTIGEN) |
| | | BIOLOGICAL PROCESS |
| | | Signal transduction (2.11.00.00.00) > Cell |
| | | communication (2.11.03.00.00) > Cell adhesion- |
| | | mediated signaling (2.11.03.01.00) |
| | | Signal transduction (2.11.00.00.00) > |
| | | Intracellular signaling cascade (2.11.02.00.00) > |
| | | Calcium mediated signaling (2.11.02.02.00) > |
| | | MAPKKK cascade (2.11.02.03.00) |
| | | Immunity and defense (2.16.00.00.00) > B- |
| | | cell- and antibody-mediated |
| | | immunity (2.16.02.00.00) |
| | | Immunity and defense (2.16.00.00.00) > |
| | | Macrophage-mediated immunity (2.16.05.00.00) |
| | | Immunity and defense (2.16.00.00.00) > T- |
| | | cell mediated immunity (2.16.01.00.00) |
| | | Oncogenesis (2.17.00.00.00) > Other |
| | | oncogenesis (2.17.99.00.00) |
| | | Apoptosis (2.26.00.00.00) > Inhibition of |
| | | apoptosis (2.26.03.00.00) |
| | | Cell structure and motility (2.27.00.00.00) > |
| | | Cell motility (2.27.02.00.00) |
| | | Cell adhesion (2.29.00.00.00) |
| | | MOLECULAR FUNCTIONS |
| | | Receptor (1.01.00.00.00) > Other |
| | | receptor (1.01.99.00.00) |
| | | HUMAN GENE ONTOLOGY |
| | | BIOLOGICAL PROCESS |
| | | cell communication > cell adhesion |
| | | stress response > defence response |
| | | MOLECULAR FUNCTION |
| | | transmembrane receptor > cell adhesion |
| | | receptor |
| | | cell adhesion > cell adhesion receptor |
| | | glycosaminoglycan binding > hyaluronic |
| | | acid binding |
| | | molecular_function unknown > lymphocyte |
| | | antigen |
| | | CELL COMPONENT |
| | | cell > membrane fraction |
| | | cell > plasma membrane |
| | | extracellular > extracellular matrix |
| | | integral plasma membrane protein > integral |
| | | plasma membrane proteoglycan |
| | | HUMAN PROTEIN DOMAINS (INTERPRO |
| | | SIGNATURES) |
| | | IPR001231 (CD44) |
| | | IPR000538 (LINKMODULE) |
| | | IPR000538 (LINK) |
| | | IPR000538 (Xlink) |
| | | IPR000538 (sp Q92493 Q92493 HUMAN) |
| hP25-017.7 | SEQ ID NO: 102 | HUMAN PANTHER CLASSIFICATIONS |
| | | FAMILY (SUBFAMILY) |
| | | CD44 ANTIGEN (CD44 ANTIGEN) |
| | | BIOLOGICAL PROCESS |
| | | Signal transduction (2.11.00.00.00) > Cell |
| | | communication (2.11.03.00.00) > Cell adhesion- |
| | | mediated signaling (2.11.03.01.00) |
| | | Signal transduction (2.11.00.00.00) > |
| | | Intracellular signaling cascade (2.11.02.00.00) > |
| | | Calcium mediated signaling (2.11.02.02.00) > |
| | | MAPKKK cascade (2.11.02.03.00) |
| | | Immunity and defense (2.16.00.00.00) > B- |
| | | cell- and antibody-mediated |
| | | immunity (2.16.02.00.00) |
| | | Immunity and defense (2.16.00.00.00) > |
| | | Macrophage-mediated immunity (2.16.05.00.00) |
| | | Immunity and defense (2.16.00.00.00) > T- |
| | | cell mediated immunity (2.16.01.00.00) |
| | | Oncogenesis (2.17.00.00.00) > Other |
| | | oncogenesis (2.17.99.00.00) |
| | | Apoptosis (2.26.00.00.00) > Inhibition of |
| | | apoptosis (2.26.03.00.00) |
| | | Cell structure and motility (2.27.00.00.00) > |
| | | Cell motility (2.27.02.00.00) |
| | | Cell adhesion (2.29.00.00.00) |
| | | MOLECULAR FUNCTIONS |
| | | Receptor (1.01.00.00.00) > Other |
| | | receptor (1.01.99.00.00) |
| | | HUMAN GENE ONTOLOGY |
| | | BIOLOGICAL PROCESS |
| | | cell communication > cell adhesion |
| | | stress response > defence response |
| | | MOLECULAR FUNCTION |
| | | glycosaminoglycan binding > hyaluronic |
| | | acid binding |
| | | transmembrane receptor > cell adhesion |
| | | receptor |
| | | cell adhesion > cell adhesion receptor |
| | | molecular_function unknown > lymphocyte |
| | | antigen |
| | | CELL COMPONENT |
| | | cell > membrane fraction |
| | | cell > plasma membrane |
| | | extracellular > extracellular matrix |
| | | integral plasma membrane protein > integral |
| | | plasma membrane proteoglycan |
| | | HUMAN PROTEIN DOMAINS (INTERPRO |
| | | SIGNATURES) |
| | | IPR001231 (CD44) |
| | | IPR000538 (LINKMODULE) |
| | | IPR000538 (LINK) |
| | | IPR000538 (Xlink) |
| | | IPR000538 (sp Q92493 Q92493 HUMAN) |
| hP25-017.8 | SEQ ID NO: 104 | HUMAN PANTHER CLASSIFICATIONS |
| | | FAMILY (SUBFAMILY) |
| | | CD44 ANTIGEN (CD44 ANTIGEN) |
| | | BIOLOGICAL PROCESS |
| | | Signal transduction (2.11.00.00.00) > Cell |
| | | communication (2.11.03.00.00) > Cell adhesion- |
| | | mediated signaling (2.11.03.01.00) |
| | | Signal transduction (2.11.00.00.00) > |
| | | Intracellular signaling cascade (2.11.02.00.00) > |
| | | Calcium mediated signaling (2.11.02.02.00) > |
| | | MAPKKK cascade (2.11.02.03.00) |
| | | Immunity and defense (2.16.00.00.00) > B- |
| | | cell- and antibody-mediated |
| | | immunity (2.16.02.00.00) |
| | | Immunity and defense (2.16.00.00.00) > |
| | | Macrophage-mediated immunity (2.16.05.00.00) |
| | | Immunity and defense (2.16.00.00.00) > T- |
| | | cell mediated immunity (2.16.01.00.00) |
| | | Oncogenesis (2.17.00.00.00) > Other |
| | | oncogenesis (2.17.99.00.00) |
| | | Apoptosis (2.26.00.00.00) > Inhibition of |
| | | apoptosis (2.26.03.00.00) |
| | | Cell structure and motility (2.27.00.00.00) > |
| | | Cell motility (2.27.02.00.00) |
| | | Cell adhesion (2.29.00.00.00) |
| | | MOLECULAR FUNCTIONS |
| | | Receptor (1.01.00.00.00) > Other |
| | | receptor (1.01.99.00.00) |
| | | HUMAN GENE ONTOLOGY |
| | | BIOLOGICAL PROCESS |
| | | cell communication > cell adhesion |
| | | stress response > defence response |
| | | MOLECULAR FUNCTION |
| | | glycosaminoglycan binding > hyaluronic |
| | | acid binding |
| | | transmembrane receptor > cell adhesion |
| | | receptor |
| | | cell adhesion > cell adhesion receptor |
| | | molecular_function unknown > lymphocyte |
| | | antigen |
| | | CELL COMPONENT |
| | | cell > membrane fraction |
| | | cell > plasma membrane |
| | | extracellular > extracellular matrix |
| | | integral plasma membrane protein > integral |
| | | plasma membrane proteoglycan |
| | | HUMAN PROTEIN DOMAINS (INTERPRO |
| | | SIGNATURES) |
| | | IPR001231 (CD44) |
| | | IPR000538 (LINKMODULE) |
| | | IPR000538 (LINK) |
| | | IPR000538 (Xlink) |
| | | IPR000538 (sp Q92493 Q92493 HUMAN) |
| hP25-017.9 | SEQ ID NO: 106 | HUMAN PANTHER CLASSIFICATIONS |
| | | FAMILY (SUBFAMILY) |
| | | CD44 ANTIGEN (CD44 ANTIGEN) |
| | | BIOLOGICAL PROCESS |
| | | Signal transduction (2.11.00.00.00) > Cell |
| | | communication (2.11.03.00.00) > Cell adhesion- |
| | | mediated signaling (2.11.03.01.00) |
| | | Signal transduction (2.11.00.00.00) > |
| | | Intracellular signaling cascade (2.11.02.00.00) > |
| | | Calcium mediated signaling (2.11.02.02.00) > |
| | | MAPKKK cascade (2.11.02.03.00) |
| | | Immunity and defense (2.16.00.00.00) > B- |
| | | cell- and antibody-mediated |
| | | immunity (2.16.02.00.00) |
| | | Immunity and defense (2.16.00.00.00) > |
| | | Macrophage-mediated immunity (2.16.05.00.00) |
| | | Immunity and defense (2.16.00.00.00) > T- |
| | | cell mediated immunity (2.16.01.00.00) |
| | | Oncogenesis (2.17.00.00.00) > Other |
| | | oncogenesis (2.17.99.00.00) |
| | | Apoptosis (2.26.00.00.00) > Inhibition of |
| | | apoptosis (2.26.03.00.00) |
| | | Cell structure and motility (2.27.00.00.00) > |
| | | Cell motility (2.27.02.00.00) |
| | | Cell adhesion (2.29.00.00.00) |
| | | MOLECULAR FUNCTIONS |
| | | Receptor (1.01.00.00.00) > Other |
| | | receptor (1.01.99.00.00) |
| | | HUMAN GENE ONTOLOGY |
| | | BIOLOGICAL PROCESS |
| | | cell communication > cell adhesion |
| | | stress response > defence response |
| | | MOLECULAR FUNCTION |
| | | molecular_function unknown > lymphocyte |
| | | antigen |
| | | glycosaminoglycan binding > hyaluronic |
| | | acid binding |
| | | transmembrane receptor > cell adhesion |
| | | receptor |
| | | cell adhesion > cell adhesion receptor |
| | | CELL COMPONENT |
| | | cell > membrane fraction |
| | | cell > plasma membrane |
| | | extracellular > extracellular matrix |
| | | integral plasma membrane protein > integral |
| | | plasma membrane proteoglycan |
| | | HUMAN PROTEIN DOMAINS (INTERPRO |
| | | SIGNATURES) |
| | | IPR000538 (LINK) |
| | | IPR000538 (Xlink) |
| | | IPR000538 (sp O95370 O95370 HUMAN) |
| hP25-017.10 | SEQ ID NO: 108 | HUMAN PANTHER CLASSIFICATIONS |
| | | FAMILY (SUBFAMILY) |
| | | CD44 ANTIGEN (CD44 ANTIGEN) |
| | | BIOLOGICAL PROCESS |
| | | Signal transduction (2.11.00.00.00) > Cell |
| | | communication (2.11.03.00.00) > Cell adhesion- |
| | | mediated signaling (2.11.03.01.00) |
| | | Signal transduction (2.11.00.00.00) > |
| | | Intracellular signaling cascade (2.11.02.00.00) > |
| | | Calcium mediated signaling (2.11.02.02.00) > |
| | | MAPKKK cascade (2.11.02.03.00) |
| | | Immunity and defense (2.16.00.00.00) > B- |
| | | cell- and antibody-mediated |
| | | immunity (2.16.02.00.00) |
| | | Immunity and defense (2.16.00.00.00) > |
| | | Macrophage-mediated immunity (2.16.05.00.00) |
| | | Immunity and defense (2.16.00.00.00) > T- |
| | | cell mediated immunity (2.16.01.00.00) |
| | | Oncogenesis (2.17.00.00.00) > Other |
| | | oncogenesis (2.17.99.00.00) |
| | | Apoptosis (2.26.00.00.00) > Inhibition of |
| | | apoptosis (2.26.03.00.00) |
| | | Cell structure and motility (2.27.00.00.00) > |
| | | Cell motility (2.27.02.00.00) |
| | | Cell adhesion (2.29.00.00.00) |
| | | MOLECULAR FUNCTIONS |
| | | Receptor (1.01.00.00.00) > Other |
| | | receptor (1.01.99.00.00) |
| | | HUMAN GENE ONTOLOGY |
| | | BIOLOGICAL PROCESS |
| | | cell communication > cell adhesion |
| | | stress response > defence response |
| | | MOLECULAR FUNCTION |
| | | glycosaminoglycan binding > hyaluronic |
| | | acid binding |
| | | transmembrane receptor > cell adhesion |
| | | receptor |
| | | cell adhesion > cell adhesion receptor |
| | | molecular_function unknown > lymphocyte |
| | | antigen |
| | | CELL COMPONENT |
| | | cell > membrane fraction |
| | | cell > plasma membrane |
| | | extracellular > extracellular matrix |
| | | integral plasma membrane protein > integral |
| | | plasma membrane proteoglycan |
| | | HUMAN PROTEIN DOMAINS (INTERPRO |
| | | SIGNATURES) |
| | | IPR001231 (CD44) |
| | | IPR000538 (LINKMODULE) |
| | | IPR000538 (LINK) |
| | | IPR000538 (Xlink) |
| | | IPR000538 (sp Q92493 Q92493 HUMAN) |
| hP25-025.1 | SEQ ID NO: 114 | HUMAN PANTHER CLASSIFICATIONS |
| | | FAMILY (SUBFAMILY) |
| | | PHOSPHATE TRANSPORTER- |
| | | RELATED (PHOSPHATE TRANSPORTER |
| | | SLC20A1-RELATED) |
| | | BIOLOGICAL PROCESS |
| | | Phosphate metabolism (2.09.00.00.00) |
| | | Transport (2.15.00.00.00) > Phosphate |
| | | transport (2.15.10.00.00) |
| | | MOLECULAR FUNCTIONS |
| | | Transporter (1.10.00.00.00) > Other |
| | | transporter (1.10.99.00.00) |
| | | HUMAN GENE ONTOLOGY |
| | | BIOLOGICAL PROCESS |
| | | isoprenoid catabolism > phosphate |
| | | metabolism |
| | | cell growth and maintenance > transport |
| | | inorganic anion transport > phosphate |
| | | transport |
| | | MOLECULAR FUNCTION |
| | | double-stranded RNA binding > double- |
| | | stranded RNA adenosine deaminase |
| | | RNA editase > double-stranded RNA |
| | | adenosine deaminase |
| | | CELL COMPONENT |
| | | cell > membrane fraction |
| | | plasma membrane > integral plasma |
| | | membrane protein |
| | | HUMAN PROTEIN DOMAINS (INTERPRO |
| | | SIGNATURES) |
| | | IPR001204 (PHO4) |
| hP25-025.2 | SEQ ID NO: 116 | HUMAN PANTHER CLASSIFICATIONS |
| | | FAMILY (SUBFAMILY) |
| | | Unclassified |
| | | HUMAN GENE ONTOLOGY |
| | | No Gene Ontology |
| | | HUMAN PROTEIN DOMAINS (INTERPRO |
| | | SIGNATURES) |
| | | No Domain Hit |
| hP25-025.3 | SEQ ID NO: 118 | HUMAN PANTHER CLASSIFICATIONS |
| | | FAMILY (SUBFAMILY) |
| | | PHOSPHATE TRANSPORTER- |
| | | RELATED (PHOSPHATE TRANSPORTER |
| | | SLC20A1-RELATED) |
| | | BIOLOGICAL PROCESS |
| | | Phosphate metabolism (2.09.00.00.00) |
| | | Transport (2.15.00.00.00) > Phosphate |
| | | transport (2.15.10.00.00) |
| | | MOLECULAR FUNCTIONS |
| | | Transporter (1.10.00.00.00) > Other |
| | | transporter (1.10.99.00.00) |
| | | HUMAN GENE ONTOLOGY |
| | | BIOLOGICAL PROCESS |
| | | isoprenoid catabolism > phosphate |
| | | metabolism |
| | | cell growth and maintenance > transport |
| | | inorganic anion transport > phosphate |
| | | transport |
| | | MOLECULAR FUNCTION |
| | | double-stranded RNA binding > double- |
| | | stranded RNA adenosine deaminase |
| | | RNA editase > double-stranded RNA |
| | | adenosine deaminase |
| | | CELL COMPONENT |
| | | cell > membrane fraction |
| | | plasma membrane > integral plasma |
| | | membrane protein |
| | | HUMAN PROTEIN DOMAINS (INTERPRO |
| | | SIGNATURES) |
| | | IPR001204 (PHO4) |
| hP26-002.1 | SEQ ID NO: 124 | HUMAN PANTHER CLASSIFICATIONS |
| | | FAMILY (SUBFAMILY) |
| | | CF10647 (gb def: (x95283) c-serate-1 |
| | | protein [gallus gallus]) |
| | | BIOLOGICAL PROCESS |
| | | Biological process |
| | | unclassified (2.99.00.00.00) |
| | | MOLECULAR FUNCTIONS |
| | | Molecular function |
| | | unclassified (1.97.00.00.00) |
| | | HUMAN GENE ONTOLOGY |
| | | BIOLOGICAL PROCESS |
| | | eye morphogenesis > mystery cell fate |
| | | differentiation |
| | | GO biological process > developmental |
| | | processes |
| | | water-soluble vitamin metabolism > biotin |
| | | metabolism |
| | | cell communication > cell adhesion |
| | | cell communication > cell recognition |
| | | MOLECULAR FUNCTION |
| | | ligand binding or carrier > calcium binding |
| | | defense/immunity protein > |
| | | immunoglobulin |
| | | B cell receptor > immunoglobulin |
| | | glycosaminoglycan binding > hyaluronic |
| | | acid binding |
| | | GO molecular function > cell adhesion |
| | | CELL COMPONENT |
| | | cell > membrane fraction |
| | | plasma membrane > integral plasma |
| | | membrane protein |
| | | extracellular > extracellular matrix |
| | | cytoplasm > lipid particle |
| | | HUMAN PROTEIN DOMAINS (INTERPRO |
| | | SIGNATURES) |
| | | IPR001438 (EGFBLOOD) |
| | | IPR001774 (DSL) |
| | | IPR001881 (EGF CA) |
| | | IPR001007 (VWC) |
| | | IPR000561 (EGF) |
| | | NULL (VWC out) |
| | | IPR000561 (EGF) |
| | | IPR001774 (DSL) |
| | | IPR001881 (EGF CA 2 10) |
| | | IPR000742 (EGF 2 DOMAIN 11) |
| | | NULL (CYS RICH) |
| hP26-004.1 | SEQ ID NO: 130 | HUMAN PANTHER CLASSIFICATIONS |
| | | FAMILY (SUBFAMILY) |
| | | CF10820 (PROTEIN-TYROSINE |
| | | PHOSPHATASE) |
| | | BIOLOGICAL PROCESS |
| | | Protein metabolism and |
| | | modification (2.05.00.00.00) > Protein |
| | | modification (2.05.03.00.00) > Protein |
| | | phosphorylation (2.05.03.01.00) |
| | | MOLECULAR FUNCTIONS |
| | | Phosphatase (1.16.00.00.00) > Protein |
| | | phosphatase (1.16.01.00.00) |
| | | HUMAN GENE ONTOLOGY |
| | | BIOLOGICAL PROCESS |
| | | protein modification > protein |
| | | dephosphorylation |
| | | enzyme linked receptor protein signaling |
| | | pathway > transmembrane receptor protein tyrosine |
| | | kinase signaling pathway |
| | | enzyme linked receptor protein signaling |
| | | pathway > transmembrane receptor protein tyrosine |
| | | phosphatase signaling pathway |
| | | axon guidance > motor axon guidance |
| | | MOLECULAR FUNCTION |
| | | protein tyrosine phosphatase > |
| | | transmembrane receptor protein tyrosine |
| | | phosphatase |
| | | transmembrane receptor > transmembrane |
| | | receptor protein tyrosine phosphatase |
| | | protein phosphatase > protein tyrosine |
| | | phosphatase |
| | | enzyme > protein phosphatase |
| | | protein tyrosine phosphatase > prenylated |
| | | protein tyrosine phosphatase |
| | | protein tyrosine phosphatase > non- |
| | | membrane spanning protein tyrosine phosphatase |
| | | CELL COMPONENT |
| | | cell > membrane fraction |
| | | cytoplasm > cytoskeleton |
| | | cell > plasma membrane |
| | | plasma membrane > integral plasma |
| | | membrane protein |
| | | cell > cytoplasm |
| | | HUMAN PROTEIN DOMAINS (INTERPRO |
| | | SIGNATURES) |
| | | IPR000998 (MAMDOMAIN) |
| | | IPR003962 (FNTYPEIII) |
| | | IPR000242 (PRTYPHPHTASE) |
| | | IPR000242 (PTPc) |
| | | IPR003961 (FN3) |
| | | IPR000998 (MAM) |
| | | IPR003595 (PTPc motif) |
| | | IPR003961 (fn3) |
| | | IPR000242 (Y phosphatase) |
| | | IPR000998 (MAM) |
| | | IPR000387 (TYR PHOSPHATASE 2 2) |
| | | IPR000998 (MAM 2) |
| | | IPR000242 (TYR PHOSPHATASE PTP 2) |
| hP26-005.1 | SEQ ID NO: 138 | HUMAN PANTHER CLASSIFICATIONS |
| | | FAMILY (SUBFAMILY) |
| | | NOT ANNOTATED (NOT ANNOTATED) |
| | | BIOLOGICAL PROCESS |
| | | Biological process |
| | | unclassified (2.99.00.00.00) |
| | | MOLECULAR FUNCTIONS |
| | | Molecular function |
| | | unclassified (1.97.00.00.00) |
| | | HUMAN GENE ONTOLOGY |
| | | BIOLOGICAL PROCESS |
| | | peptidoglycan catabolism > pheromone |
| | | induction of gene expression from Pol II promoter |
| | | pheromone induction of gene expression > |
| | | pheromone induction of gene expression from Pol |
| | | II promoter |
| | | transcription regulation from Pol II |
| | | promoter > pheromone induction of gene |
| | | expression from Pol II promoter |
| | | pheromone response > pheromone induction |
| | | of gene expression from Pol II promoter |
| | | MOLECULAR FUNCTION |
| | | enzyme > N- |
| | | acetylglucosaminylphosphatidylinositol deacetylase |
| | | CELL COMPONENT |
| | | plasma membrane > integral plasma |
| | | membrane protein |
| | | HUMAN PROTEIN DOMAINS (INTERPRO |
| | | SIGNATURES) |
| | | No Domain Hit |
| hP26-005.2 | SEQ ID NO: 140 | HUMAN PANTHER CLASSIFICATIONS |
| | | FAMILY (SUBFAMILY) |
| | | NOT ANNOTATED (NOT ANNOTATED) |
| | | BIOLOGICAL PROCESS |
| | | Biological process |
| | | unclassified (2.99.00.00.00) |
| | | MOLECULAR FUNCTIONS |
| | | Molecular function |
| | | unclassified (1.97.00.00.00) |
| | | HUMAN GENE ONTOLOGY |
| | | BIOLOGICAL PROCESS |
| | | peptidoglycan catabolism > pheromone |
| | | induction of gene expression from Pol II promoter |
| | | pheromone induction of gene expression > |
| | | pheromone induction of gene expression from Pol |
| | | II promoter |
| | | transcription regulation from Pol II |
| | | promoter > pheromone induction of gene |
| | | expression from Pol II promoter |
| | | pheromone response > pheromone induction |
| | | of gene expression from Pol II promoter |
| | | MOLECULAR FUNCTION |
| | | enzyme > N- |
| | | acetylglucosaminylphosphatidylinositol deacetylase |
| | | CELL COMPONENT |
| | | plasma membrane > integral plasma |
| | | membrane protein |
| | | HUMAN PROTEIN DOMAINS (INTERPRO |
| | | SIGNATURES) |
| | | NULL (LEU RICH) |
| hP26-005.3 | SEQ ID NO: 142 | HUMAN PANTHER CLASSIFICATIONS |
| | | FAMILY (SUBFAMILY) |
| | | NOT ANNOTATED (NOT ANNOTATED) |
| | | BIOLOGICAL PROCESS |
| | | Biological process |
| | | unclassified (2.99.00.00.00) |
| | | MOLECULAR FUNCTIONS |
| | | Molecular function |
| | | unclassified (1.97.00.00.00) |
| | | HUMAN GENE ONTOLOGY |
| | | BIOLOGICAL PROCESS |
| | | peptidoglycan catabolism > pheromone |
| | | induction of gene expression from Pol II promoter |
| | | pheromone induction of gene expression > |
| | | pheromone induction of gene expression from Pol |
| | | II promoter |
| | | transcription regulation from Pol II |
| | | promoter > pheromone induction of gene |
| | | expression from Pol II promoter |
| | | pheromone response > pheromone induction |
| | | of gene expression from Pol II promoter |
| | | MOLECULAR FUNCTION |
| | | enzyme > N- |
| | | acetylglucosaminylphosphatidylinositol deacetylase |
| | | CELL COMPONENT |
| | | plasma membrane > integral plasma |
| | | membrane protein |
| | | HUMAN PROTEIN DOMAINS (INTERPRO |
| | | SIGNATURES) |
| | | NULL (LEU RICH) |
| hP26-005.4 | SEQ ID NO: 144 | HUMAN PANTHER CLASSIFICATIONS |
| | | FAMILY (SUBFAMILY) |
| | | NOT ANNOTATED (NOT ANNOTATED) |
| | | BIOLOGICAL PROCESS |
| | | Biological process |
| | | unclassified (2.99.00.00.00) |
| | | MOLECULAR FUNCTIONS |
| | | Molecular function |
| | | unclassified (1.97.00.00.00) |
| | | HUMAN GENE ONTOLOGY |
| | | BIOLOGICAL PROCESS |
| | | peptidoglycan catabolism > pheromone |
| | | induction of gene expression from Pol II promoter |
| | | pheromone induction of gene expression > |
| | | pheromone induction of gene expression from Pol |
| | | II promoter |
| | | transcription regulation from Pol II |
| | | promoter > pheromone induction of gene |
| | | expression from Pol II promoter |
| | | pheromone response > pheromone induction |
| | | of gene expression from Pol II promoter |
| | | MOLECULAR FUNCTION |
| | | enzyme > N- |
| | | acetylglucosaminylphosphatidylinositol deacetylase |
| | | CELL COMPONENT |
| | | plasma membrane > integral plasma |
| | | membrane protein |
| | | HUMAN PROTEIN DOMAINS (INTERPRO |
| | | SIGNATURES) |
| | | NULL (LEU RICH) |
| hP26-005.5 | SEQ ID NO: 146 | HUMAN PANTHER CLASSIFICATIONS |
| | | FAMILY (SUBFAMILY) |
| | | NOT ANNOTATED (NOT ANNOTATED) |
| | | BIOLOGICAL PROCESS |
| | | Biological process |
| | | unclassified (2.99.00.00.00) |
| | | MOLECULAR FUNCTIONS |
| | | Molecular function |
| | | unclassified (1.97.00.00.00) |
| | | HUMAN GENE ONTOLOGY |
| | | No Gene Ontology |
| | | HUMAN PROTEIN DOMAINS (INTERPRO |
| | | SIGNATURES) |
| | | No Domain Hit |
| hP26-005.6 | SEQ ID NO: 148 | HUMAN PANTHER CLASSIFICATIONS |
| | | FAMILY (SUBFAMILY) |
| | | NOT ANNOTATED (NOT ANNOTATED) |
| | | BIOLOGICAL PROCESS |
| | | Biological process |
| | | unclassified (2.99.00.00.00) |
| | | MOLECULAR FUNCTIONS |
| | | Molecular function |
| | | unclassified (1.97.00.00.00) |
| | | HUMAN GENE ONTOLOGY |
| | | BIOLOGICAL PROCESS |
| | | peptidoglycan catabolism > pheromone |
| | | induction of gene expression from Pol II promoter |
| | | pheromone induction of gene expression > |
| | | pheromone induction of gene expression from Pol |
| | | II promoter |
| | | transcription regulation from Pol II |
| | | promoter > pheromone induction of gene |
| | | expression from Pol II promoter |
| | | pheromone response > pheromone induction |
| | | of gene expression from Pol II promoter |
| | | MOLECULAR FUNCTION |
| | | enzyme > N- |
| | | acetylglucosaminylphosphatidylinositol deacetylase |
| | | CELL COMPONENT |
| | | plasma membrane > integral plasma |
| | | membrane protein |
| | | HUMAN PROTEIN DOMAINS (INTERPRO |
| | | SIGNATURES) |
| | | NULL (LEU RICH) |
| hP26-005.7 | SEQ ID NO: 150 | HUMAN PANTHER CLASSIFICATIONS |
| | | FAMILY (SUBFAMILY) |
| | | NOT ANNOTATED (NOT ANNOTATED) |
| | | BIOLOGICAL PROCESS |
| | | Biological process |
| | | unclassified (2.99.00.00.00) |
| | | MOLECULAR FUNCTIONS |
| | | Molecular function |
| | | unclassified (1.97.00.00.00) |
| | | HUMAN GENE ONTOLOGY |
| | | BIOLOGICAL PROCESS |
| | | peptidoglycan catabolism > pheromone |
| | | induction of gene expression from Pol II promoter |
| | | pheromone induction of gene expression > |
| | | pheromone induction of gene expression from Pol |
| | | II promoter |
| | | transcription regulation from Pol II |
| | | promoter > pheromone induction of gene |
| | | expression from Pol II promoter |
| | | pheromone response > pheromone induction |
| | | of gene expression from Pol II promoter |
| | | MOLECULAR FUNCTION |
| | | enzyme > N- |
| | | acetylglucosaminylphosphatidylinositol deacetylase |
| | | CELL COMPONENT |
| | | plasma membrane > integral plasma |
| | | membrane protein |
| | | HUMAN PROTEIN DOMAINS (INTERPRO |
| | | SIGNATURES) |
| | | NULL (LEU RICH) |
| hP26-009.1 | SEQ ID NO: 156 | HUMAN PANTHER CLASSIFICATIONS |
| | | FAMILY (SUBFAMILY) |
| | | Unclassified |
| | | HUMAN GENE ONTOLOGY |
| | | No Gene Ontology |
| | | HUMAN PROTEIN DOMAINS (INTERPRO |
| | | SIGNATURES) |
| | | No Domain Hit |
| hP26-009.2 | SEQ ID NO: 158 | HUMAN PANTHER CLASSIFICATIONS |
| | | FAMILY (SUBFAMILY) |
| | | CADHERIN (gb def: (al109928) |
| | | dj551d2.1.1 (cadherin-like protein vr20, isoform 1) |
| | | [homo sapiens]) |
| | | BIOLOGICAL PROCESS |
| | | Biological process |
| | | unclassified (2.99.00.00.00) |
| | | MOLECULAR FUNCTIONS |
| | | Molecular function |
| | | unclassified (1.97.00.00.00) |
| | | HUMAN GENE ONTOLOGY |
| | | No Gene Ontology |
| | | HUMAN PROTEIN DOMAINS (INTERPRO |
| | | SIGNATURES) |
| | | No Domain Hit |
| hP26-009.3 | SEQ ID NO: 160 | HUMAN PANTHER CLASSIFICATIONS |
| | | FAMILY (SUBFAMILY) |
| | | CADHERIN (gb def: (al109928) |
| | | dj551d2.1.1 (cadherin-like protein vr20, isoform 1) |
| | | [homo sapiens]) |
| | | BIOLOGICAL PROCESS |
| | | Biological process |
| | | unclassified (2.99.00.00.00) |
| | | MOLECULAR FUNCTIONS |
| | | Molecular function |
| | | unclassified (1.97.00.00.00) |
| | | HUMAN GENE ONTOLOGY |
| | | No Gene Ontology |
| | | HUMAN PROTEIN DOMAINS (INTERPRO |
| | | SIGNATURES) |
| | | IPR002126 (CA) |
| | | IPR002126 (cadherin) |
| | | IPR000233 (Cadherin C term) |
| | | IPR002126 (CADHERIN 2 3) |
| hP26-009.4 | SEQ ID NO: 162 | HUMAN PANTHER CLASSIFICATIONS |
| | | FAMILY (SUBFAMILY) |
| | | CADHERIN (gb def: (al109928) |
| | | dj551d2.1.1 (cadherin-like protein vr20, isoform 1) |
| | | [homo sapiens]) |
| | | BIOLOGICAL PROCESS |
| | | Biological process |
| | | unclassified (2.99.00.00.00) |
| | | MOLECULAR FUNCTIONS |
| | | Molecular function |
| | | unclassified (1.97.00.00.00) |
| | | HUMAN GENE ONTOLOGY |
| | | No Gene Ontology |
| | | HUMAN PROTEIN DOMAINS (INTERPRO |
| | | SIGNATURES) |
| | | IPR002126 (CA) |
| | | IPR002126 (cadherin) |
| | | IPR002126 (CADHERIN 2 3) |
| hP26-009.5 | SEQ ID NO: 164 | HUMAN PANTHER CLASSIFICATIONS |
| | | FAMILY (SUBFAMILY) |
| | | CADHERIN (gb def: (al109928) |
| | | dj551d2.1.1 (cadherin-like protein vr20, isoform 1) |
| | | [homo sapiens]) |
| | | BIOLOGICAL PROCESS |
| | | Biological process |
| | | unclassified (2.99.00.00.00) |
| | | MOLECULAR FUNCTIONS |
| | | Molecular function |
| | | unclassified (1.97.00.00.00) |
| | | HUMAN GENE ONTOLOGY |
| | | No Gene Ontology |
| | | HUMAN PROTEIN DOMAINS (INTERPRO |
| | | SIGNATURES) |
| | | IPR002126 (CADHERIN) |
| | | IPR002126 (CA) |
| | | IPR002126 (cadherin) |
| | | IPR002126 (CADHERIN 2 4) |
| hP26-009.6 | SEQ ID NO: 166 | HUMAN PANTHER CLASSIFICATIONS |
| | | FAMILY (SUBFAMILY) |
| | | CADHERIN (gb def: (al109928) |
| | | dj551d2.1.1 (cadherin-like protein vr20, isoform 1) |
| | | [homo sapiens]) |
| | | BIOLOGICAL PROCESS |
| | | Biological process |
| | | unclassified (2.99.00.00.00) |
| | | MOLECULAR FUNCTIONS |
| | | Molecular function |
| | | unclassified (1.97.00.00.00) |
| | | HUMAN GENE ONTOLOGY |
| | | No Gene Ontology |
| | | HUMAN PROTEIN DOMAINS (INTERPRO |
| | | SIGNATURES) |
| | | IPR002126 (CADHERIN) |
| | | IPR002126 (CA) |
| | | IPR002126 (cadherin) |
| | | IPR002126 (CADHERIN 2 4) |
| hP26-013.1 | SEQ ID NO: 172 | HUMAN PANTHER CLASSIFICATIONS |
| | | FAMILY (SUBFAMILY) |
| | | CADHERIN (gb def: (ab046782) kiaa1562 |
| | | protein [homo sapiens]) |
| | | BIOLOGICAL PROCESS |
| | | Biological process |
| | | unclassified (2.99.00.00.00) |
| | | MOLECULAR FUNCTIONS |
| | | Cell adhesion molecule (1.05.00.00.00) > |
| | | Cadherin (1.05.02.00.00) |
| | | HUMAN GENE ONTOLOGY |
| | | BIOLOGICAL PROCESS |
| | | cell communication > cell adhesion |
| | | cell communication > cell-cell signaling |
| | | ectoderm development > neurogenesis |
| | | MOLECULAR FUNCTION |
| | | cell adhesion > calcium-dependent cell |
| | | adhesion |
| | | GO molecular function > cell adhesion |
| | | CELL COMPONENT |
| | | cell > plasma membrane |
| | | plasma membrane > integral plasma |
| | | membrane protein |
| | | HUMAN PROTEIN DOMAINS (INTERPRO |
| | | SIGNATURES) |
| | | IPR002126 (CADHERIN) |
| | | IPR002126 (CA) |
| | | IPR002126 (cadherin) |
| | | IPR002126 (CADHERIN 2 6) |
| hP26-013.2 | SEQ ID NO: 174 | HUMAN PANTHER CLASSIFICATIONS |
| | | FAMILY (SUBFAMILY) |
| | | CADHERIN (gb def: (ab046782) kiaa1562 |
| | | protein [homo sapiens]) |
| | | BIOLOGICAL PROCESS |
| | | Biological process |
| | | unclassified (2.99.00.00.00) |
| | | MOLECULAR FUNCTIONS |
| | | Cell adhesion molecule (1.05.00.00.00) > |
| | | Cadherin (1.05.02.00.00) |
| | | HUMAN GENE ONTOLOGY |
| | | BIOLOGICAL PROCESS |
| | | cell communication > cell adhesion |
| | | cell communication > cell-cell signaling |
| | | ectoderm development > neurogenesis |
| | | MOLECULAR FUNCTION |
| | | cell adhesion > calcium-dependent cell |
| | | adhesion |
| | | GO molecular function > cell adhesion |
| | | CELL COMPONENT |
| | | cell > plasma membrane |
| | | plasma membrane > integral plasma |
| | | membrane protein |
| | | HUMAN PROTEIN DOMAINS (INTERPRO |
| | | SIGNATURES) |
| | | IPR002126 (CADHERIN) |
| | | IPR002126 (CA) |
| | | IPR002126 (cadherin) |
| | | IPR002126 (CADHERIN 2 6) |

[0313] A CA protein (CAP) is a signalling protein wherein the CAP sequence is selected from the group consisting of SEQ ID NOS: 6, 12, 14, 96, 130, 172 and 174 shown in Tables 1-16.

[0314] A CA protein (CAP) is involved in signal transduction wherein the CAP sequence is selected from the group consisting of SEQ ID NOS: 20, 84, 90, 92, 94, 96, 98, 100, 102, 104, 106, and 108 shown in Tables 1-16.

[0315] A CA protein (CAP) is a cell adhesion protein wherein the CAP sequence is selected from the group consisting of SEQ ID NOS: 36, 38, 40, 84, 90, 92, 94, 96, 98, 100, 102, 104, 106, 108, 124, 172, and 174 as shown in Tables 1-16.

[0316] A CA protein (CAP) is involved in inflammatory response wherein the CAP sequence is selected from the group consisting of SEQ ID NOS: 62, 64, 66, 68, 72, 74, and 76 as shown in Tables 1-16.

[0317] A CA protein (CAP) is involved in pheromone response wherein the CAP sequence is selected from the group consisting of SEQ ID NOS: 138, 140, 142, 144, 146, 148, and 150 as shown in Tables 1-16.

[0318] A CA protein (CAP) is an ion transport protein wherein the CAP sequence is selected from the group consisting of SEQ ID NOS: 28, 30, 114, and 118 as shown in Tables 1-16.

[0319] A CA protein (CAP) is expressed on a cell surface, wherein the CA protein is selected from the group consisting of SEQ ID NOS: 6, 12, 14, 20, 28, 30, 36, 38, 40, 46, 52, 54, 56, 62, 64, 66, 68, 70, 72, 74, 76, 84, 90, 92, 94, 96, 98, 100, 102, 104, 106, 108, 114, 116, 118, 124, 130, 138, 140, 142, 144, 146, 148, 150, 156, 158, 160, 162, 164, 166, 172, and 174 as shown in Tables 1-16.

[0320] Certain aspects of the present invention are described in greater detail in the non-limiting examples that follow.

### EXAMPLES

[0321] The following examples are put forth so as to provide those of ordinary skill in the art with a complete disclosure and description of how to make and use the present invention, and are not intended to limit the scope of what the inventors regard as their invention nor are they intended to represent that the experiments below are all and only experiments performed. Efforts have been made to ensure accuracy with respect to numbers used (e.g. amounts, temperature, etc.) but some experimental errors and deviations should be accounted for. Unless indicated otherwise, parts are parts by weight, molecular weight is weight average molecular weight, temperature is in degrees Celsius, and pressure is at or near atmospheric.

### Example 1

### Insertion Site Analysis Following Tumor Induction in Mice

[0322] Tumors are induced in mice using either mouse mammary tumor virus (MMTV) or murine leukemia virus (MLV). MMTV causes mammary adenocarcinomas and MLV causes a variety of different hematopoetic malignancies (primarily T- or B-cell lymphomas). Three routes of infection are used: (1) injection of neonates with purified virus preparations, (2) infection by milk-borne virus during nursing, and (3) genetic transmission of pathogenic proviruses via the germ-line (Akvr1 and/or Mtv2). The type of malignancy present in each affected mouse is determined by histological analysis of H&E-stained thin sections of formalin-fixed, paraffin-embedded biopsy samples. Host DNA sequences flanking all clonally-integrated proviruses in each tumor are recovered by nested anchored-PCR using two virus-specific primers and two primers specific for a 40 bp double stranded DNA anchor ligated to restriction enzyme digested tumor DNA. Amplified bands representing host/virus junction fragments are cloned and sequenced. Then the host sequences (called “tags”) are used to BLAST analyze the Celera mouse genomic sequence. For each individual tag, three parameters are recorded: (1) the mouse chromosome assignment, (2) base pair coordinates at which the integration occurred, and (3) provirus orientation. Using this information, all available tags from all analyzed tumors are mapped to the mouse genome. To identify the protooncogene targets of provirus insertion mutation, the provirus integration pattern at each cluster of integrants is analyzed relative to the locations of all known genes in the transcriptome. The presence of provirus at the same locus in two or more independent tumors is prima facie evidence that a protooncogene is present at or very near the proviral integration sites. This is because the genome is too large for random integrations to result in observable clustering. Any clustering that is detected is unequivocal evidence for biological selection during tumorigenesis. In order to identify the human orthologs of the protooncogene targets of provirus insertion mutation, a comparative analysis of syntenic regions of the mouse and human genomes is performed.

[0323] An example of PCR amplification of host/virus junction fragments is presented in FIG. 1. Lane 1 contains the amplification products from normal control DNA and lane 2 contains the amplification products from tumor DNA. The bands result from 5′ host/virus junction fragments present in the DNA samples. Lane 1 has bands from the env/3′ LTR junctions from all proviruses (upper) and the host/5′ LTR from the pathogenic endogenous Mtv2 provirus present in this particular mouse strain. This endogenous provirus is detected because its sequence is identical to the new clonally integrated proviruses in the tumor. All four new clonally integrated proviruses known to be in this tumor are readily detected.

### Example 2

### Analysis of Quantitative RT-PCR: Comparative C_{T} Method

[0324] The expression level of target genes is quantified using the ABI PRISM 7900HT Sequence Detection System (Applied Biosystems, California). The method is based on the quantitation of the initial copy number of target template in comparison to that of a reference (normalizer) housekeeper gene (Pre-Developed TaqMan® Assay Reagents Gene Expression Quantification Protocol, Applied Biosystems, 2001). Accumulation of DNA product with each PCR cycle is related to amplicon efficiency and the initial template concentration. Therefore the amplification efficiency of both the target and the normalizer must be approximately equal. The threshold cycle (C_{T}), which is dependent on the starting template copy number and the DNA amplification efficiency, is a PCR cycle during which PCR product growth is exponential. With a similar dynamic range for the target and normalizer, the comparative C_{T} method is applicable.

[0325] An example of the comparative C_{T} method of gene expression for quantitative RT-PCR is shown in FIG. 2. In the first step, assays are performed in quadruplicate on a normal tissue and several sample tissues. In these tissues, the means and standard deviations of C_{T} values are determined for housekeeper genes (chosen as controls if shown to be biologically stable among various samples, irrespective of disease state) and for the target gene. FIG. 2 shows an example of average C_{T} values for a housekeeper gene and target gene. These values can fall within a range from upper teens to 40 depending on the intrinsic expression level of the gene in the particular tissue. The coefficient of variance of all replicate sets cannot exceed 1.5%.

[0326] An assessment of how the ΔC_{T} changes with template dilution verifies that the efficiencies of the target and housekeeper amplicons are approximately equal if the log input amount of template RNA versus ΔC_{T} plot has a slope <0.10. With the relative efficiencies verified for target and housekeeper, the ΔΔC_{T} comparative calculation becomes valid, as mentioned above. An example of the calculated difference between the C_{T} values of target and housekeeper genes (ΔC_{T}) for various samples is shown in FIG. 3. The ΔΔC_{T} is calculated for each sample by subtracting its ΔC_{T} value from the ΔC_{T} value of the baseline (calibrator) sample. If the expression is increased in some samples and decreased in others, ΔΔC_{T} will be a mixture of negative and positive values. The final step in the calculation is to transform these values to absolute values. The formula for this is:

Comparative expression level=2^{-ΔΔCT}

[0327] The final value for the calibrator should always be one. FIG. 4 shows the ΔΔC_{T} and comparative expression level for each sample from FIG. 3.

### Example 3

### Detection of Elevated Levels of cDNA Associated with Cancer Using Arrays

[0328] cDNA sequences representing a variety of candidate CA genes to be screened for differential expression in cancer are assayed by hybridization on polynucleotide arrays. The cDNA sequences include cDNA clones isolated from cell lines or tissues of interest. The cDNA sequences analyzed also include polynucleotides comprising sequence overlap with sequences in the Unigene database, and which encode a variety of gene products of various origins, functionality, and levels of characterization. cDNAs are spotted onto reflective slides (Amersham) according to methods well known in the art at a density of 9,216 spots per slide representing 4,068 sequences (including controls) spotted in duplicate, with approximately 0.8 μl of an approximately 200 ng/μl solution of cDNA.

[0329] PCR products of selected cDNA clones corresponding to the gene products of interest are prepared in a 50% DMSO solution. These PCR products are spotted onto Amersham aluminum microarray slides at a density of 9216 clones per array using a Molecular Dynamics Generation III spotting robot. Clones are spotted in duplicate, for a total of 4608 different sequences per chip.

[0330] cDNA probes are prepared from total RNA obtained by laser capture microdissection (LCM, Arcturus Engineering Inc., Mountain View, Calif.) of tumor tissue samples and normal tissue samples isolated from patients.

[0331] Total RNA is first reverse transcribed into cDNA using a primer containing a T7 RNA polymerase promoter, followed by second strand DNA synthesis. cDNA is then transcribed in vitro to produce antisense RNA using the T7 promoter-mediated expression (see, e.g., Luo et al. (1999) Nature Med 5:117-122), and the antisense RNA is then converted into cDNA. The second set of cDNAs are again transcribed in vitro, using the T7 promoter, to provide antisense RNA. This antisense RNA is then fluorescently labeled, or the RNA is again converted into cDNA, allowing for a third round of T7-mediated amplification to produce more antisense RNA. Thus the procedure provides for two or three rounds of in vitro transcription to produce the final RNA used for fluorescent labeling. Probes are labeled by making fluorescently labeled cDNA from the RNA starting material. Fluorescently labeled cDNAs prepared from the tumor RNA sample are compared to fluorescently labeled cDNAs prepared from normal cell RNA sample. For example, the cDNA probes from the normal cells are labeled with Cy3 fluorescent dye (green) and the cDNA probes prepared from suspected cancer cells are labeled with Cy5 fluorescent dye (red).

[0332] The differential expression assay is performed by mixing equal amounts of probes from tumor cells and normal cells of the same patient. The arrays are prehybridized by incubation for about 2 hrs at 60° C. in 5×SSC, 0.2% SDS, 1 mM EDTA, and then washing three times in water and twice in isopropanol. Following prehybridization of the array, the probe mixture is then hybridized to the array under conditions of high stringency (overnight at 42° C. in 50% formamide, 5×SSC, and 0.2% SDS. After hybridization, the array is washed at 55° C. three times as follows: 1) first wash in 1×SSC/0.2% SDS; 2) second wash in 0.1×SSC/0.2% SDS; and 3) third wash in 0.1×SSC.

[0333] The arrays are then scanned for green and red fluorescence using a Molecular Dynamics Generation III dual color laser-scanner/detector. The images are processed using BioDiscovery Autogene software, and the data from each scan set normalized. The experiment is repeated, this time labeling the two probes with the opposite color in order to perform the assay in both “color directions.” Each experiment is sometimes repeated with two more slides (one in each color direction). The data from each scan is normalized, and the level of fluorescence for each sequence on the array expressed as a ratio of the geometric mean of 8 replicate spots/genes from the four arrays or 4 replicate spots/gene from 2 arrays or some other permutation.

[0334] Normalization: The objective of normalization is to generate a cDNA library in which all transcripts expressed in a particular cell type or tissue are equally represented (S. M. Weissman, Mol. Biol. Med. 4(3):133-143 (1987); Patanjali, et al., Proc. Natl. Acad. Sci. USA 88(5):1943-1947 (1991)), and therefore isolation of as few as 30,000 recombinant clones in an optimally normalized library may represent the entire gene expression repertoire of a cell, estimated to number 10,000 per cell.

[0335] Total RNA is extracted from harvested cells using RNeasy™ Protect Kit (Qiagen, Valencia, Calif.), following manufacturer's recommended procedures. RNA is quantified using RiboGreen™ RNA quantification kit (Molecular Probes, Inc. Eugene, Oreg.). One μg of total RNA is reverse transcribed and PCR amplified using SMART™ PCR cDNA synthesis kit (ClonTech, Palo Alto, Calif.). The cDNA products are size-selected by agarose gel electrophoresis using standard procedures (Sambrook, J. T., et al. Molecular Cloning: A Laboratory Manual, 2d ed., Cold Spring Harbor Laboratory Press, NY). The cDNA is extracted using Bio 101 Geneclean® II kit (Qbiogene, Carlsbad, Calif.). Normalization of the cDNA is carried out using kinetics of hybridization principles: 1.0 μg of cDNA is denatured by heat at 100° C. for 10 minutes, then incubated at 42° C. for 42 hours in the presence of 120 mM NaCl, 10 mM Tris.HCl (pH=8.0), 5 mM EDTA.Na+ and 50% formamide. Single-stranded cDNA (“normalized”) is purified by hydroxyapatite chromatography (#130-0520, BioRad, Hercules, Calif.) following the manufacturer's recommended procedures, amplified and converted to double-stranded cDNA by three cycles of PCR amplification, and cloned into plasmid vectors using standard procedures (Sambrook, J. T., et al. Molecular Cloning: A Laboratory Manual, 2d ed., Cold Spring Harbor Laboratory Press, NY). All primers/adaptors used in the normalization and cloning process are provided by the manufacturer in the SMART™ PCR cDNA synthesis kit (ClonTech, Palo Alto, Calif.). Supercompetent cells (XL-2 Blue Ultracompetent Cells, Stratagene, Calif.) are transfected with the normalized cDNA libraries, plated on solid media and grown overnight at 36° C.

[0336] The sequences of 10,000 recombinants per normalized library are analyzed by capillary sequencing using the ABI PRISM 3700 DNA Analyzer (Applied Biosystems, California). To determine the representation of transcripts in a library, BLAST analysis is performed on the clone sequences to assign transcript identity to each isolated clone, i.e., the sequences of the isolated polynucleotides are first masked to eliminate low complexity sequences using the XBLAST masking program (Claverie “Effective Large-Scale Sequence Similarity Searches,” Computer Methods for Macromolecular Sequence Analysis, Doolittle, ed., Meth. Enzymol. 266:212-227 Academic Press, NY, N.Y. (1996); see particularly Claverie, in “Automated DNA Sequencing and Analysis Techniques” Adams et al., eds., Chap. 36, p. 267 Academic Press, San Diego, 1994 and Claverie et al. Comput. Chem. (1993) 17:191). Generally, masking does not influence the final search results, except to eliminate sequences of relative little interest due to their low complexity, and to eliminate multiple “hits” based on similarity to repetitive regions common to multiple sequences, e.g., Alu repeats. The remaining sequences are then used in a BLASTN vs. GenBank search. The sequences are also used as query sequence in a BLASTX vs. NRP (non-redundant proteins) database search.

[0337] Automated sequencing reactions are performed using a Perkin-Elmer PRISM Dye Terminator Cycle Sequencing Ready Reaction Kit containing AmpliTaq DNA Polymerase, FS, according to the manufacturer's directions. The reactions are cycled on a GeneAmp PCR System 9600 as per manufacturer's instructions, except that they are annealed at 20° C. or 30° C. for one minute. Sequencing reactions are ethanol precipitated, pellets are resuspended in 8 microliters of loading buffer, 1.5 microliters is loaded on a sequencing gel, and the data is collected by an ABI PRISM 3700 DNA Sequencer. (Applied Biosystems, Foster City, Calif.).

[0338] The number of times a sequence is represented in a library is determined by performing sequence identity analysis on the cloned cDNA sequences and assigning transcript identity to each isolated clone. First, each sequence is checked to determine if it is a bacterial, ribosomal, or mitochondrial contaminant. Such sequences are excluded from the subsequent analysis. Second, sequence artifacts, such as vector and repetitive elements, are masked and/or removed from each sequence.

[0339] The remaining sequences are compared via BLAST (Altschul et al, J. Mol. Biol., 215:40, 1990) to GenBank and EST databases for gene identification and are compared with each other via FastA (Pearson & Lipman, PNAS, 85:2444, 1988) to calculate the frequency of cDNA appearance in the normalized cDNA library. The sequences are also searched against the GenBank and GeneSeq nucleotide databases using the BLASTN program (BLASTN 1.3 MP: Altschul et al., J. Mol. Bio. 215:403, 1990). Fourth, the sequences are analyzed against a non-redundant protein (NRP) database with the BLASTX program (BLASTX 1.3 MP: Altschul et al., supra). This protein database is a combination of the Swiss-Prot, PIR, and NCBI GenPept protein databases. The BLASTX program is run using the default BLOSUM-62 substitution matrix with the filter parameter: “xnu+seg”. The score cutoff utilized is 75. Assembly of overlapping clones into contigs is done using the program Sequencher (Gene Codes Corp.; Ann Arbor, Mich.). The assembled contigs are analyzed using the programs in the GCG package (Genetic Computer Group, University Research Park, 575 Science Drive, Madison, Wis. 53711) Suite Version 10.1.

### Example 4

### Detection of CA-Sequences in Human Cancer Cells and Tissues

[0340] DNA from prostate and breast cancer tissues and other human cancer tissues, human colon, normal human tissues including non-cancerous prostate, and from other human cell lines are extracted following the procedure of Delli Bovi et al. (1986, Cancer Res. 46:6333-6338). The DNA is resuspended in a solution containing 0.05 M Tris HCl buffer, pH 7.8, and 0.1 mM EDTA, and the amount of DNA recovered is determined by microfluorometry using Hoechst 33258 dye. Cesarone, C. et al., Anal Biochem 100:188-197 (1979).

[0341] Polymerase chain reaction (PCR) is performed using Taq polymerase following the conditions recommended by the manufacturer (Perkin Elmer Cetus) with regard to buffer, Mg²⁺, and nucleotide concentrations. Thermocycling is performed in a DNA cycler by denaturation at 94° C. for 3 min. followed by either 35 or 50 cycles of 94° C. for 1.5 min., 50° C. for 2 min. and 72° C. for 3 min. The ability of the PCR to amplify the selected regions of the CA gene is tested by using a cloned CA polynucleotide(s) as a positive template(s). Optimal Mg²⁺, primer concentrations and requirements for the different cycling temperatures are determined with these templates. The master mix recommended by the manufacturer is used. To detect possible contamination of the master mix components, reactions without template are routinely tested.

[0342] Southern blotting and hybridization are performed as described by Southern, E. M., (J. Mol. Biol. 98:503-517, 1975), using the cloned sequences labeled by the random primer procedure (Feinberg, A. P., et al., 1983, Anal. Biochem. 132:6-13). Prehybridization and hybridization are performed in a solution containing 6×SSPE, 5% Denhardt's, 0.5% SDS, 50% formamide, 100 μg/ml denaturated salmon testis DNA, incubated for 18 hrs at 42° C., followed by washings with 2×SSC and 0.5% SDS at room temperature and at 37° C. and finally in 0.1×SSC with 0.5% SDS at 68° C. for 30 min (Sambrook et al., 1989, in “Molecular Cloning: A Laboratory Manual”, Cold Spring Harbor Lab. Press). For paraffin-embedded tissue sections the conditions described by Wright and Manos (1990, in “PCR Protocols”, Innis et al., eds., Academic Press, pp. 153-158) are followed using primers designed to detect a 250 bp sequence.

### Example 5

### Expression of Cloned Polynucleotides in Host Cells

[0343] To study the protein products of CA genes, restriction fragments from CA DNA are cloned into the expression vector pMT2 (Sambrook, et al., Molecular Cloning: A Laboratory Manual, Cold Spring Harbor Laboratory Press pp 16.17-16.22 (1989)) and transfected into COS cells grown in DMEM supplemented with 10% FCS. Transfections are performed employing calcium phosphate techniques (Sambrook, et al (1989) pp. 16.32-16.40, supra) and cell lysates are prepared forty-eight hours after transfection from both transfected and untransfected COS cells. Lysates are subjected to analysis by immunoblotting using anti-peptide antibody.

[0344] In immunoblotting experiments, preparation of cell lysates and electrophoresis are performed according to standard procedures. Protein concentration is determined using BioRad protein assay solutions. After semi-dry electrophoretic transfer to nitrocellulose, the membranes are blocked in 500 mM NaCl, 20 mM Tris, pH 7.5, 0.05% Tween-20 (TTBS) with 5% dry milk. After washing in TTBS and incubation with secondary antibodies (Amersham), enhanced chemiluminescence (ECL) protocols (Amersham) are performed as described by the manufacturer to facilitate detection.

### Example 6

### Generation of Antibodies Against Polypeptides

[0345] Polypeptides, unique to CA genes are synthesized or isolated from bacterial or other (e.g., yeast, baculovirus) expression systems and conjugated to rabbit serum albumin (RSA) with m-maleimido benzoic acid N-hydroxysuccinimide ester (MBS) (Pierce, Rockford, Ill.). Immunization protocols with these peptides are performed according to standard methods. Initially, a pre-bleed of the rabbits is performed prior to immunization. The first immunization includes Freund's complete adjuvant and 500 μg conjugated peptide or 100 μg purified peptide. All subsequent immunizations, performed four weeks after the previous injection, include Freund's incomplete adjuvant with the same amount of protein. Bleeds are conducted seven to ten days after the immunizations.

[0346] For affinity purification of the antibodies, the corresponding CA polypeptide is conjugated to RSA with MBS, and coupled to CNBr-activated Sepharose (Pharmacia, Uppsala, Sweden). Antiserum is diluted 10-fold in 10 mM Tris-HCl, pH 7.5, and incubated overnight with the affinity matrix. After washing, bound antibodies are eluted from the resin with 100 mM glycine, pH 2.5.

### Example 7

### Generation of Monoclonal Antibodies Against a CA Polypeptide

[0347] A non-denaturing adjuvant (Ribi, R730, Corixa, Hamilton Mont.) is rehydrated to 4 ml in phosphate buffered saline. 100 μg of this rehydrated adjuvant is then diluted with 400 μg of Hank's Balanced Salt Solution and this is then gently mixed with the cell pellet used for immunization. Approximately 500 μg conjugated peptide or 100 μg purified peptide and Freund's complete are injected into Balb/c mice via foot-pad, once a week. After 6 weeks of weekly injection, a drop of blood is drawn from the tail of each immunized animal to test the titer of antibodies against CA polypeptides using FACS analysis. When the titer reaches at least 1:2000, the mice are sacrificed in a CO₂ chamber followed by cervical dislocation. Lymph nodes are harvested for hybridoma preparation. Lymphocytes from mice with the highest titer are fused with the mouse myeloma line X63-Ag8.653 using 35% polyethylene glycol 4000. On day 10 following the fusion, the hybridoma supernatants are screened for the presence of CAP-specific monoclonal antibodies by fluorescence activated cell sorting (FACS). Conditioned medium from each hybridoma is incubated for 30 minutes with a combined aliquot of PC3, Colo-205, LnCap, or Panc-1 cells. After incubation, the cell samples are washed, resuspended in 0.1 ml diluent and incubated with 1 μg/ml of FITC conjugated F(ab′)2 fragment of goat anti-mouse IgG for 30 min at 4° C. The cells are washed, resuspended in 0.5 ml FACS diluent and analyzed using a FACScan cell analyzer (Becton Dickinson; San Jose, Calif.). Hybridoma clones are selected for further expansion, cloning, and characterization based on their binding to the surface of one or more of cell lines which express the CA polypeptide as assessed by FACS. A hybridoma making a monoclonal antibody designated mAbCA which binds an antigen designated Ag-CA.x and an epitope on that antigen designated Ag-CA.x.1 is selected.

### Example 8

### ELISA Assay for Detecting CA Related Antigens

[0348] To test blood samples for antibodies that bind specifically to recombinantly produced CA antigens, the following procedure is employed. After a recombinant CA related protein is purified, the recombinant protein is diluted in PBS to a concentration of 5 μg/ml (500 ng/100 μl). 100 microliters of the diluted antigen solution is added to each well of a 96-well Immulon 1 plate (Dynatech Laboratories, Chantilly, Va.), and the plate is then incubated for 1 hour at room temperature, or overnight at 4° C., and washed 3 times with 0.05% Tween 20 in PBS. Blocking to reduce nonspecific binding of antibodies is accomplished by adding to each well 200 μl of a 1% solution of bovine serum albumin in PBS/Tween 20 and incubation for 1 hour. After aspiration of the blocking solution, 100 μl of the primary antibody solution (anticoagulated whole blood, plasma, or serum), diluted in the range of 1/16 to 1/2048 in blocking solution, is added and incubated for 1 hour at room temperature or overnight at 4° C. The wells are then washed 3 times, and 100 μl of goat anti-human IgG antibody conjugated to horseradish peroxidase (Organon Teknika, Durham, N.C.), diluted 1/500 or 1/1000 in PBS/Tween 20, 100 μl of o-phenylenediamine dihydrochloride (OPD, Sigma) solution is added to each well and incubated for 5-15 minutes. The OPD solution is prepared by dissolving a 5 mg OPD tablet in 50 ml 1% methanol in H₂O and adding 50 μl 30% H₂O₂ immediately before use. The reaction is stopped by adding 25 l of 4M H₂SO₄. Absorbances are read at 490 nm in a microplate reader (Bio-Rad).

### Example 9

### Identification and Characterization of CA Antigen on Cancer Cell Surface

[0349] A cell pellet of proximately 25 ul packed cell volume of a cancer cell preparation is lysed by first diluting the cells to 0.5 ml in water followed by freezing and thawing three times. The solution is centrifuged at 14,000 rpm. The resulting pellet, containing the cell membrane fragments, is resuspended in 50 μl of SDS sample buffer (Invitrogen, Carlsbad, Calif.). The sample is heated at 80° C. for 5 minutes and then centrifuged for 2 minutes at 14,000 rpm to remove any insoluble materials.

[0350] The samples are analyzed by Western blot using a 4 to 20% polyacrylamide gradient gel in Tris-Glycine SDS (Invitrogen; Carlsbad Calif.) following the manufacturer's directions. Ten microliters of membrane sample are applied to one lane on the polyacrylamide gel. A separate 10 μL sample is reduced first by the addition of 2 μL of dithiothreitol (100 mM) with heating at 80° C. for 2 minutes and then loaded into another lane. Pre-stained molecular weight markers SeeBlue Plus2 (Invitrogen; Carlsbad, Calif.) are used to assess molecular weight on the gel. The gel proteins are transferred to a nitrocellulose membrane using a transfer buffer of 14.4 g/l glycine, 3 g/l of Tris Base, 10% methanol, and 0.05% SDS. The membranes are blocked, probed with a CAP-specific monoclonal antibody (at a concentration of 0.5 ug/ml), and developed using the Invitrogen WesternBreeze Chromogenic Kit-AntiMouse according to the manufacturer's directions. In the reduced sample of the tumor cell membrane samples, a prominent band is observed migrating at a molecular weight within about 10% of the predicted molecular weight of the corresponding CA protein.

### Example 10

### Preparation of Vaccines

[0351] The present invention also relates to a method of stimulating an immune response against cells that express CA polypeptides in a patient using CA polypeptides of the invention that act as an antigen produced by or associated with a malignant cell. This aspect of the invention provides a method of stimulating an immune response in a human against cancer cells or cells that express CA polynucleotides and polypeptides. The method comprises the step of administering to a human an immunogenic amount of a polypeptide comprising: (a) the amino acid sequence of a huma CA protein or (b) a mutein or variant of a polypeptide comprising the amino acid sequence of a human endogenous retrovirus CA protein.

### Example 11

### Generation of Transgenic Animals Expressing Polypeptides as a Means for Testing Therapeutics

[0352] CA nucleic acids are used to generate genetically modified non-human animals, or site specific gene modifications thereof, in cell lines, for the study of function or regulation of prostate tumor-related genes, or to create animal models of diseases, including prostate cancer. The term “transgenic” is intended to encompass genetically modified animals having an exogenous CA gene(s) that is stably transmitted in the host cells where the gene(s) may be altered in sequence to produce a modified protein, or having an exogenous CA LTR promoter operably linked to a reporter gene. Transgenic animals may be made through a nucleic acid construct randomly integrated into the genome. Vectors for stable integration include plasmids, retroviruses and other animal viruses, YACs, and the like. Of interest are transgenic mammals, e.g. cows, pigs, goats, horses, etc., and particularly rodents, e.g. rats, mice, etc.

[0353] The modified cells or animals are useful in the study of CA gene function and regulation. For example, a series of small deletions and/or substitutions may be made in the CA genes to determine the role of different genes in tumorigenesis. Specific constructs of interest include, but are not limited to, antisense constructs to block CA gene expression, expression of dominant negative CA gene mutations, and over-expression of a CA gene. Expression of a CA gene or variants thereof in cells or tissues where it is not normally expressed or at abnormal times of development is provided. In addition, by providing expression of proteins derived from CA in cells in which it is otherwise not normally produced, changes in cellular behavior can be induced.

[0354] DNA constructs for random integration need not include regions of homology to mediate recombination. Conveniently, markers for positive and negative selection are included. For various techniques for transfecting mammalian cells, see Keown et al., Methods in Enzymology 185:527-537 (1990).

[0355] For embryonic stem (ES) cells, an ES cell line is employed, or embryonic cells are obtained freshly from a host, e.g. mouse, rat, guinea pig, etc. Such cells are grown on an appropriate fibroblast-feeder layer or grown in the presence of appropriate growth factors, such as leukemia inhibiting factor (LIF). When ES cells are transformed, they may be used to produce transgenic animals. After transformation, the cells are plated onto a feeder layer in an appropriate medium. Cells containing the construct may be detected by employing a selective medium. After sufficient time for colonies to grow, they are picked and analyzed for the occurrence of integration of the construct. Those colonies that are positive may then be used for embryo manipulation and blastocyst injection. Blastocysts are obtained from 4 to 6 week old superovulated females. The ES cells are trypsinized, and the modified cells are injected into the blastocoel of the blastocyst. After injection, the blastocysts are returned to each uterine horn of pseudopregnant females. Females are then allowed to go to term and the resulting chimeric animals screened for cells bearing the construct. By providing for a different phenotype of the blastocyst and the ES cells, chimeric progeny can be readily detected.

[0356] The chimeric animals are screened for the presence of the modified gene and males and females having the modification are mated to produce homozygous progeny. If the gene alterations cause lethality at some point in development, tissues or organs are maintained as allogeneic or congenic grafts or transplants, or in in vitro culture. The transgenic animals may be any non-human mammal, such as laboratory animals, domestic animals, etc. The transgenic animals are used in functional studies, drug screening, etc., e.g. to determine the effect of a candidate drug on prostate cancer, to test potential therapeutics or treatment regimens, etc.

### Example 12

### Diagnostic Imaging Using CA Specific Antibodies

[0357] The present invention encompasses the use of antibodies to CA polypeptides to accurately stage cancer patients at initial presentation and for early detection of metastatic spread of cancer. Radioimmunoscintigraphy using monoclonal antibodies specific for CA polypeptides can provide an additional cancer-specific diagnostic test. The monoclonal antibodies of the instant invention are used for histopathological diagnosis of carcinomas.

[0358] Subcutaneous human xenografts of cancer cells in nude mice is used to test whether a technetium-99m (^{99m}Tc)-labeled monoclonal antibody of the invention can successfully image the xenografted cancer by external gamma scintography as described for seminoma cells by Marks, et al., Brit. J. Urol. 75:225 (1995). Each monoclonal antibody specific for a CA polypeptide is purified from ascitic fluid of BALB/c mice bearing hybridoma tumors by affinity chromatography on protein A-Sepharose. Purified antibodies, including control monoclonal antibodies such as an avidin-specific monoclonal antibody (Skea, et al., J. Immunol. 151:3557 (1993)) are labeled with ^{99m}Tc following reduction, using the methods of Mather, et al., J. Nucl. Med. 31:692 (1990) and Zhang et al., Nucl. Med. Biol. 19:607 (1992). Nude mice bearing human cancer cells are injected intraperitoneally with 200-500 μCi of ^{99m}Tc-labeled antibody. Twenty-four hours after injection, images of the mice are obtained using a Siemens ZLC3700 gamma camera equipped with a 6 mm pinhole collimator set approximately 8 cm from the animal. To determine monoclonal antibody biodistribution following imaging, the normal organs and tumors are removed, weighed, and the radioactivity of the tissues and a sample of the injectate are measured. Additionally, CA-specific antibodies conjugated to antitumor compounds are used for cancer-specific chemotherapy.

### Example 13

### Immunohistochemical Methods

[0359] Frozen tissue samples from cancer patients are embedded in an optimum cutting temperature (OCT) compound and quick-frozen in isopentane with dry ice. Cryosections are cut with a Leica 3050 CM mictrotome at thickness of 5 μm and thaw-mounted on vectabound-coated slides. The sections are fixed with ethanol at −20° C. and allowed to air dry overnight at room temperature. The fixed sections are stored at −80° C. until use. For immunohistochemistry, the tissue sections are retrieved and first incubated in blocking buffer (PBS, 5% normal goat serum, 0.1% Tween 20) for 30 minutes at room temperature, and then incubated with the CA protein-specific monoclonal antibody and control monoclonal antibodies diluted in blocking buffer (1 μg/ml) for 120 minutes. The sections are then washed three times with the blocking buffer. The bound monoclonal antibodies are detected with a goat anti-mouse IgG+IgM (H+L) F(ab′)²-peroxidase conjugates and the peroxidase substrate diaminobenzidine (1 mg/ml, Sigma Catalog No. D 5637) in 0.1 M sodium acetate buffer pH 5.05 and 0.003% hydrogen peroxide (Sigma cat. No. H1009). The stained slides are counter-stained with hematoxylin and examined under Nikon microscope.

[0360] Monoclonal antibody against a CA protein (antigen) is used to test reactivity with various cell lines from different types of tissues. Cells from different established cell lines are removed from the growth surface without using proteases, packed and embedded in OCT compound. The cells are frozen and sectioned, then stained using a standard IHC protocol. The CellArray™ technology is described in WO 01/43869. Normal tissue (human) obtained by surgical resection are frozen and mounted. Cryosections are cut with a Leica 3050 CM mictrotome at thickness of 5 μm and thaw-mounted on vectabound-coated slides. The sections are fixed with ethanol at −20° C. and allowed to air dry overnight at room temperature. PolyMICA™ Detection kit is used to determine binding of a CA-specific monoclonal antibody to normal tissue. Primary monoclonal antibody is used at a final concentration of 1 μg/ml.

[0361] All publications and patent applications cited in this specification are herein incorporated by reference as if each individual publication or patent application were specifically and individually indicated to be incorporated by reference.

[0362] Although the foregoing invention has been described in some detail by way of illustration and example for purposes of clarity of understanding, it will be readily apparent to those of ordinary skill in the art in light of the teachings of this invention that certain changes and modifications may be made thereto without departing from the spirit or scope of the appended claims.

The application's sequence listing, which the Patent Office published only in electronic form, follows.

SEQUENCE LISTING (175 sequences)

SEQ ID NO: 1 - DNA, 4547 bp, Mus Musculus
  misc_feature (2735)..(2740): n = A, C, G, or T/U
  misc_feature (2741)..(2750): n = A, C, G, or T/U
  misc_feature (2751)..(2754): n = A, C, G, or T/U
cagaccgtctaggtcccaagaacttttcagggcacttttagggacgcatatatccacgattcctcctgggcagcgccatgaagtccctgtggctttgctgggcactctgggtactgcccctggctggccctggggcagcgatgaccgaggaacaggtcctgagcagtctactgcagcagctgcagctcagccaggcccccaccctggacagcgcggatgtggaggagatggccatccctacccacgtgaggtcccagtatgtggccctgctgcagggaagtcacgctgaccgctcccgaggcaagaggttcagccagaattttcgaggtgagctcttcctgctgtccctggtctctagacagggcagactgaccatgcccactctggtgatgtagaccctttctttgtgtgtgtgttgagaggtgtgaccaagtcctcaggactctcaaggccaggaggagatatacatcaggctggagtgactgacaagacccagactcagagaagaatagagcagggcaaaacaggatcatagggtatgggtaggtgtagcaaggacccagttcttctggagacagtagtgtgacttctggggtgactatctaggaccatctgggacagtggccaactgtgtcttgtgctatgaacactgaagtaaattactggttgaagctactttgggttaaaagcaaacaaaacgtccagtattctgagaacagtatagcccgctagtgagatgcaggagcctaaatggagcctctccccgttagggctgggatcagaaagaaagccagatccatgacccggcttctataaggaccctactctcttcagcttcattacttctggatcccaaagctctttgtgcttgcttggggaggtttagtgaacaagctcttgctggagattttaaaaaggcacagaactgtaacggctctgtcctggcctccttcaagtacagtggctctgccatcctagaggtcttgtgatacctggagaggcccggctgactctgtccttgtccacagaggtggcaggcaggttcctgatgtcagagacctccactcacctgctagtgttcggaatggagcagcggctgccgcctaacagcgagctggtgcaggctgtgctgcggctgttccaggagcctgtgcccagaacagctctccggaggtttgagaggctgtccccacacagtgcccgggctcgggtcaccattgaatggctgagagtccgtgaggatggctccaatcgcactgccctcatcgactctaggtaggggatgctgctggatgctgttgttgctgatgtgtgtgtgcgcgcacgtgcgcgcgtgtgttgggggagttgggaagtgagggactcgcccatgcagggggaggggagcagcagatgatagggatgggtaccggacgggacagactcctccttcagggcctccctaacagcctgccagtcccctcgcctgacgcgcactgctgtgtttcaggctcgtgtccatccacgagagcggctggaaggccttcgacgtgaccgaggccgtgaacttctggcagcagctgagccggccgaggcagccgctgctgctccaggtgtcggtgcagagggagcatctggggccggggacctggagcgcacacaagttggtccgtttcgcggcgcaggggacgccggacggcaaggggcagggcgagccacagctggagctgcacacgctggacctcaaggactacgggtaggctggaggttgggtggctagggatgcaatagacccggtcctcctccctctctgcccccagccgcgccgagattttgtaccagcttaggtgtgaactgtgtaggctgccccgggagatgagccattcctacctataatactttctagcggtgcgtttagaaatggtattataatattgaattataacattctatttccactgtccccttcaagagtaagtctttgaagatttttagcttcaagccaggcattggtggcacatgcttttaatcccacacttggaagggagaggcaggcagatccccgagttcgaggccagtctggtctataaaggatagctaaagctacacacagagacatcctatttcaaaaaacccaaaccaaaccaaaccaaacaaccaaccactaaaaacagaacaaacaacaacaaaacccatcttattaggcatatactttaaacatttgtatttgctactattgcgcatgtgtgtccgtgtgtacacactgtgttctactctgtcacctttatatgagttccagggatccaatccagcccaggtcatcagttttgcatggcaagctctttacctgctaagctaccttgcctcccctgcatatactctttgttgttgttaaaaattctttattttgggggaattttattcatatatacaatgtatctttatcatagcattctctactccccatcttgctcctcctgataagcattatagtgtgtgtgtgtataggggtgtgtgtgtgtgcatatatgtggtatgtgtgttgtgtgaagtatgtgtgcatgtgtatatgtgtggtatgtgtggtgcatgtggaatgtgtggtgtatgtgtgtgtggtgtgcatgtgttgtgtatgtgttgtgtgatatgtggtgtgtatatgtatgtgtggtatatgtgtgtgtagtgtgtatgtgtgtggggtgtgtatgtgtggtgtgtgtatttatgtgtggtatatgtggtatatgtgnnnnnnnnnnnnnnnnnnnntatgtgcatgttgtgtatgtggtatgtgtatatgtgtggtatgtgtagtatgtgtgcaagtggtgtgtatgtatgtgtggtatatgtgtgtgtgtgtgcagtgtgtatgtgtggtgtgcatgtgtgtatatgtggtgtgtgtgtgtgtgtttgtggtgtgggtgtgcttgttctatagcaggcatgtggtggtcaaaggatgaccttgaatgtcagtgtctaccttaagccttgtttgagagaggggtaccttgttactcagcatgaagtttggctgcaagcttccggaggttctcctgtccctaccttctcttttactttaaggttatattgattactgaggcacactacctgccagccttctgtgggcactggggatttgaactcaggctgctctcatatttgtgctcttcccccattgagcaatctgcccagcgcttgttttgtattttgaggcatgggtctcatatagctccagctgctcttgaattctttacacagctcaggatgaccatgaaccgctgatcttgccatcttctcctccctagtgctggggttacaggcatgcgtcaccaggtcaccagcagcatgtgcttttaaaagaccttctcagtcctcactactatgtagttggccgggaactctgtgtaggtcagtgtggcctcagctttatagatcagtctgtcattgcttcccgagtgctagggagattaaaggcaggcattaccatgctcaacttcactaggtattataggtagccaagtacggtttaaagcttctaggagggtgtgcatagttcatatgtacaggctgtaccgttttggtatccttgggctttctggacgccatctcccatggacactagtcactgaggacaagttgcttaagaccaggcctttgtcgtgaagttcggttctatctagctctgcttttcacttgttctccatcatgtcactgagcacctttgggtctcagagtcctcaggtataacaaggctaagaccagaactcccttcaggattcctctgaggatgaagtacaaatatcaccctagataacacataggccatatgtagttctggcataccaagactcttagtaagcactttatgttctagacatttatttgttctttaatcttcacagtgttctctttgaagaccttgggaaatggttggtaggacttccttccctgccctgtcaggtgacctttgctctctcacccctacagagctcaaggcaattgtgaccccgaggtaccagtgactgaaggcacccgatgctgtcgccaggagatgtacctggacctgcaggggatgaagtgggccgagaactggatcctagaaccgccagggttcctgacgtatgaatgtgtgggcagctgcctgcagctaccagagtccctgaccatcgggtggccatttctggggcctcggcagtgtgttgcctcagagatgacctccttgcccatgattgtcagcgtgaaggagggaggcaggaccaggcctcaagtggtcagcctgcccaacatgagggtgcagacctgtagctgcgcctcagatggggcgctcatacccagggggatagatctgtagtctccctgtccacagatgtattctcagtgagcttgtcctaacttagtgctcacgtcagacctttgctctacagtcttggttttcttgtccatcacccagtttaagcacttacatgggtaaatcatgtcactccagtaggacacactgaccccacttagccaaggacatggctatgcagtgaacaggttcgcagctgagt

SEQ ID NO: 2 - DNA, 3663 bp, Mus Musculus
cagaccgtctaggtcccaagaacttttcagggcacttttagggacgcatatatccacgattcctcctgggcagcgccatgaagtccctgtggctttgctgggcactctgggtactgcccctggctggccctggggcagcgatgaccgaggaacaggtcctgagcagtctactgcagcagctgcagctcagccaggcccccaccctggacagcgcggatgtggaggagatggccatccctacccacgtgaggtcccagtatgtggccctgctgcagggaagtcacgctgaccgctcccgaggcaagaggttcagccagaattttcgaggtgagctcttcctgctgtccctggtctctagacagggcagactgaccatgcccactctggtgatgtagaccctttctttgtgtgtgtgttgagaggtgtgaccaagtcctcaggactctcaaggccaggaggagatatacatcaggctggagtgactgacaagacccagactcagagaagaatagagcagggcaaaacaggatcatagggtatgggtaggtgtagcaaggacccagttcttctggagacagtagtgtgacttctggggtgactatctaggaccatctgggacagtggccaactgtgtcttgtgctatgaacactgaagtaaattactggttgaagctactttgggttaaaagcaaacaaaacgtccagtattctgagaacagtatagcccgctagtgagatgcaggagcctaaatggagcctctccccgttagggctgggatcagaaagaaagccagatccatgacccggcttctataaggaccctactctcttcagcttcattacttctggatcccaaagctctttgtgcttgcttggggaggtttagtgaacaagctcttgctggagattttaaaaaggcacagaactgtaacggctctgtcctggcctccttcaagtacagtggctctgccatcctagaggtcttgtgatacctggagaggcccggctgactctgtccttgtccacagaggtggcaggcaggttcctgatgtcagagacctccactcacctgctagtgttcggaatggagcagcggctgccgcctaacagcgagctggtgcaggctgtgctgcggctgttccaggagcctgtgcccagaacagctctccggaggtttgagaggctgtccccacacagtgcccgggctcgggtcaccattgaatggctgagagtccgtgaggatggctccaatcgcactgccctcatcgactctaggtaggggatgctgctggatgctgttgttgctgatgtgtgtgtgcgcgcacgtgcgcgcgtgtgttgggggagttgggaagtgagggactcgcccatgcagggggaggggagcagcagatgatagggatgggtaccggacgggacagactcctccttcagggcctccctaacagcctgccagtcccctcgcctgacgcgcactgctgtgtttcaggctcgtgtccatccacgagagcggctggaaggccttcgacgtgaccgaggccgtgaacttctggcagcagctgagccggccgaggcagccgctgctgctccaggtgtcggtgcagagggagcatctggggccggggacctggagcgcacacaagttggtccgtttcgcggcgcaggggacgccggacggcaaggggcagggcgagccacagctggagctgcacacgctggacctcaaggactacgggtaggctggaggttgggtggctagggatgcaatagacccggtcctcctccctctctgcccccagccgcgccgagattttgtaccagcttaggtgtgaactgtgtaggctgccccgggagatgagccattcctacctataatactttctagcggtgcgtttagaaatggtattataatattgaattataacattctatttccactgtccccttcaagagtaagtctttgaagatttttagcttcaagccaggcattggtggcacatgcttttaatcccacacttggaagggagaggcaggcagatccccgagttcgaggccagtctggtctataaaggatagctaaagctacacacagagacatcctatttcaaaaaacccaaaccaaaccaaaccaaacaaccaaccactaaaaacagaacaaacaacaacaaaacccatcttattaggcatatactttaaacatttgtatttgctactattgcgcatgtgtgtccgtgtgtacacactgtgttctactctgtcacctttatatgagttccagggcagaccgtctaggtcccaagaacttttcagggcacttttagggacgcatatatccacgattcctcctgggcagcgccatgaagtccctgtggctttgctgggcactctgggtactgcccctggctggccctggggcagcgatgaccgaggaacaggtcctgagcagtctactgcagcagctgcagctcagccaggcccccaccctggacagcgcggatgtggaggagatggccatccctacccacgtgaggtcccagtatgtggccctgctgcagggaagtcacgctgaccgctcccgaggcaagaggttcagccagaattttcgagaggtggcaggcaggttcctgatgtcagagacctccactcacctgctagtgttcggaatggagcagcggctgccgcctaacagcgagctggtgcaggctgtgctgcggctgttccaggagcctgtgcccagaacagctctccggaggtttgagaggctgtccccacacagtgcccgggctcgggtcaccattgaatggctgagagtccgtgaggatggctccaatcgcactgccctcatcgactctaggctcgtgtccatccacgagagcggctggaaggccttcgacgtgaccgaggccgtgaacttctggcagcagctgagccggccgaggcagccgctgctgctccaggtgtcggtgcagagggagcatctggggccggggacctggagcgcacacaagttggtccgtttcgcggcgcaggggacgccggacggcaaggggcagggcgagccacagctggagctgcacacgctggacctcaaggactacggagctcaaggcaattgtgaccccgaggtaccagtgactgaaggcacccgatgctgtcgccaggagatgtacctggacctgcaggggatgaagtgggccgagaactggatcctagaaccgccagggttcctgacgtatgaatgtgtgggcagctgcctgcagctaccagagtccctgaccatcgggtggccatttctggggcctcggcagtgtgttgcctcagagatgacctccttgcccatgattgtcagcgtgaaggagggaggcaggaccaggcctcaagtggtcagcctgcccaacatgagggtgcagacctgtagctgcgcctcagatggggcgctcatacccagggggatagatctgtagtctccctgtccacagatgtattctcagtgagcttgtcctaacttagtgctcacgtcagacctttgctctacagtcttggttttcttgtccatcacccagtttaagcacttacatgggtaaatcatgtcactccagtaggacacactgaccccacttagccaaggacatggctatgcagtgaacaggttcgcagctgagt

SEQ ID NO: 3 - protein, 380 aa, Mus Musculus
GRIYPRFLLGSAMKSLWLCWALWVLPLAGPGAAMTEEQVLSSLLQQLQLSQAPTLDSADVEEMAIPTHVRSQYVALLQGSHADRSRGKRFSQNFREVAGRFLMSETSTHLLVFGMEQRLPPNSELVQAVLRLFQEPVPRTALRRFERLSPHSARARVTIEWLRVREDGSNRTALIDSRLVSIHESGWKAFDVTEAVNFWQQLSRPRQPLLLQVSVQREHLGPGTWSAHKLVRFAAQGTPDGKGQGEPQLELHTLDLKDYGAQGNCDPEVPVTEGTRCCRQEMYLDLQGMKWAENWILEPPGFLTYECVGSCLQLPESLTIGWPFLGPRQCVASEMTSLPMIVSVKEGGRTRPQVVSLPNMRVQTCSCASDGALIPRGIDL

SEQ ID NO: 4 - DNA, 2867 bp, Homo Sapiens
acatccagctgcctgagaccctcctgcagccttctcaagggacagccccactctgcctcttgctcctccagggcagcaccatgcagcccctgtggctctgctgggcactctgggtgttgcccctggccagccccggggccgccctgaccggggagcagctcctgggcagcctgctgcggcagctgcagctcaaagaggtgcccaccctggacagggccgacatggaggagctggtcatccccacccacgtgagggcccagtacgtggccctgctgcagcgcagccacggggaccgctcccgcggaaagaggttcagccagagcttccgaggtgaggccctccctccctgctgcccctggtcccatggggcaggtcagatgtgcccactccggtggtgtcaaagggctcctggccttgcagaggtctgtgggaggctgagtgagggccacggtctaaggggcagtgaggtggggccgggcctgtgaggatggcggggcctcagcatgcagcggtgcatgcagtcaggactccgggggtctgttttcgtactgccactctggtctgagttctacttggagcatattgctttaaaatcatctcacaaccatttgctcacatggaactggggtataactatgtcttgcccatcttccagcattgtgaacatcaaaatgagtcattgtaaatagaagcgtgtttgggtaactgaaaaatactgcacttgagtagacaacctgggttatacctggctgtcaggggtgcagcgggcctgaatcctcctgcagccggcctgaatcctcctgcagcctctcgcctccctagctcctcagtgcccagagctagacccaatgccaggcacctgggtgaggattctgctcccagcatctcagctgaggcaaacttgctagccagggtcccacaggcgcccctgcctgctggatggaaattgttactaaacaaggcccagatccaaggaagatttgtaaactgggtttgccccagaaatagaacagggccggtgtctcctggcctggctgccagctcagtggccctgccatcctcagagctcccctggagtcgggggaggccctgctgaccctgctcttgtccccagaggtggccggcaggttcctggcgttggaggccagcacacacctgctggtgttcggcatggagcagcggctgccgcccaacagcgagctggtgcaggccgtgctgcggctcttccaggagccggtccccaaggccgcgctgcacaggcacgggcggctgtccccgcgcagcgcccgggcccgggtgaccgtcgagtggctgcgcgtccgcgacgacggctccaaccgcacctccctcatcgactccaggtgggggtcgcgggggcgcgcagggtagggggagggcgctgctaggcccggcttgggggcggggacgcggggggcggtgcggggtcctcggggcccgtcccagtccccgccctcaagcggcgctgggtctctgtgtcatgtctcaggctggtgtccgtccacgagagcggctggaaggccttcgacgtgaccgaggccgtgaacttctggcagcagctgagccggccccggcagccgctgctgctacaggtgtcggtgcagagggagcatctgggcccgctggcgtccggcgcccacaagctggtccgctttgcctcgcagggggcgccagccgggcttggggagccccagctggagctgcacaccctggaccttggggactatgggtaggtgctgagggtcaaactggtaagccggaataaagagacaggcaattacatttattttgaaatggacaacttttcagagtgctgtgggaatgaatgagacaatgtatacaattcttcctctgactcttaggagatcctcagtaaatatcggttattaattttcaagttatttctagctgtccatcctatatcacaaacatccagctttttgaagttgagaggtggatcataaatctccatcccagacgccctctgacctcagccctcccagctgaccgctgaccctgctctctttgcccacacagagctcagggcgactgtgaccctgaagcaccaatgaccgagggcacccgctgctgccgccaggagatgtacattgacctgcaggggatgaagtgggccgagaactgggtgctggagcccccgggcttcctggcttatgagtgtgtgggcacctgccggcagcccccggaggccctggccttcaagtggccgtttctggggcctcgacagtgcatcgcctcggagactgactcgctgcccatgatcgtcagcatcaaggagggaggcaggaccaggccccaggtggtcagcctgcccaacatgagggtgcagaagtgcagctgtgcctcggatggtgcgctcgtgccaaggaggctccagccataggcgcctagtgtagccatcgagggacttgacttgtgtgtgtttctgaagtgttcgagggtaccaggagagctggcgatgactgaactgctgatggacaaatgctctgtgctctctagtgagccctgaatttgcttcctctgacaagttacctcacctaatttttgcttctcaggaatgagaatctttggccactggagagcccttgctcagttttctctattcttattattcactgcactatattctaagcacttacatgtggagatactgtaacctgagggcagaaagcccaatgtgtcattgtttacttgtcctgtcactggatctgggctaaagtcctccaccaccactctggacctaagacctggggttaagtgtgggttgtgcatccccaatccagataataaagactttgtaaaacatgaataaaacacattttattctataa

SEQ ID NO: 5 - DNA, 1629 bp, Homo Sapiens
acatccagctgcctgagaccctcctgcagccttctcaagggacagccccactctgcctcttgctcctccagggcagcaccatgcagcccctgtggctctgctgggcactctgggtgttgcccctggccagccccggggccgccctgaccggggagcagctcctgggcagcctgctgcggcagctgcagctcaaagaggtgcccaccctggacagggccgacatggaggagctggtcatccccacccacgtgagggcccagtacgtggccctgctgcagcgcagccacggggaccgctcccgcggaaagaggttcagccagagcttccgagaggtggccggcaggttcctggcgttggaggccagcacacacctgctggtgttcggcatggagcagcggctgccgcccaacagcgagctggtgcaggccgtgctgcggctcttccaggagccggtccccaaggccgcgctgcacaggcacgggcggctgtccccgcgcagcgcccgggcccgggtgaccgtcgagtggctgcgcgtccgcgacgacggctccaaccgcacctccctcatcgactccaggctggtgtccgtccacgagagcggctggaaggccttcgacgtgaccgaggccgtgaacttctggcagcagctgagccggccccggcagccgctgctgctacaggtgtcggtgcagagggagcatctgggcccgctggcgtccggcgcccacaagctggtccgctttgcctcgcagggggcgccagccgggcttggggagccccagctggagctgcacaccctggaccttggggactatggagctcagggcgactgtgaccctgaagcaccaatgaccgagggcacccgctgctgccgccaggagatgtacattgacctgcaggggatgaagtgggccgagaactgggtgctggagcccccgggcttcctggcttatgagtgtgtgggcacctgccggcagcccccggaggccctggccttcaagtggccgtttctggggcctcgacagtgcatcgcctcggagactgactcgctgcccatgatcgtcagcatcaaggagggaggcaggaccaggccccaggtggtcagcctgcccaacatgagggtgcagaagtgcagctgtgcctcggatggtgcgctcgtgccaaggaggctccagccataggcgcctagtgtagccatcgagggacttgacttgtgtgtgtttctgaagtgttcgagggtaccaggagagctggcgatgactgaactgctgatggacaaatgctctgtgctctctagtgagccctgaatttgcttcctctgacaagttacctcacctaatttttgcttctcaggaatgagaatctttggccactggagagcccttgctcagttttctctattcttattattcactgcactatattctaagcacttacatgtggagatactgtaacctgagggcagaaagcccaatgtgtcattgtttacttgtcctgtcactggatctgggctaaagtcctccaccaccactctggacctaagacctggggttaagtgtgggttgtgcatccccaatccagataataaagactttgtaaaacatgaataaaacacattttattctataa

SEQ ID NO: 6 - protein, 366 aa, Homo Sapiens
MQPLWLCWALWVLPLASPGAALTGEQLLGSLLRQLQLKEVPTLDRADMEELVIPTHVRAQYVALLQRSHGDRSRGKRFSQSFREVAGRFLALEASTHLLVFGMEQRLPPNSELVQAVLRLFQEPVPKAALHRHGRLSPRSARARVTVEWLRVRDDGSNRTSLIDSRLVSVHESGWKAFDVTEAVNFWQQLSRPRQPLLLQVSVQREHLGPLASGAHKLVRFASQGAPAGLGEPQLELHTLDLGDYGAQGDCDPEAPMTEGTRCCRQEMYIDLQGMKWAENWVLEPPGFLAYECVGTCRQPPEALAFKWPFLGPRQCIASETDSLPMIVSIKEGGRTRPQVVSLPNMRVQKCSCASDGALVPRRLQP

SEQ ID NO: 7 - DNA, 85658 bp, Mus Musculus
  misc_feature (1006)..(1025): n is a, c, g, or t
  misc_feature (4121)..(4140): n is a, c, g, or t
  misc_feature (17624)..(17664): n is a, c, g, or t
  misc_feature (72876)..(75556): n is a, c, g, or t
tgttatctgctggcagcaggtttgctcggagcagagctgctgaaactgccggcaggagagcgagtgggagagaaagagagaaggcgctgagagctgagctctggggcaggcgtcagggatggagagaagtattagggtttaaagagccattctggagcaacccatctgcggagagaaggatcggcagaggtctattttagggtcgcaagtacctacttaccctaagcgagaaagtgcaaccttggtggaagctaggagaagctagggaagggtgcgagtcccggggcagcccgcagccaacgcgcccaggaggcggtgttgttccacaggggttaaggaggtggccgatcgctgtcgcccttggccgcctggagcaagaaaaggaggatctgaaggaccgagctggaggctggccctctttgcaggcagcagcggcggctgcaacgtggagcgacccagccgggtgtaggccacagcgcggccggcaggagcgggatcctcgccgcctgctccggcctctgtggatctccggggcggacagtatcccaccgagtctccgagtgagccgctccggggcgcatctgcctccccgcggctcgccaggctcgccctcggcgcgcgcgcacgcacgcgcgcacacgcgcacacatccacacgcacactcatccacacacgtgtggaaggcagggccgagccgctcggtctttgaacttctcagttagagcccggcgcagccccggccgccgctcagcgctccccgcggccctgcgtgcctcctgccagcccccggaccttctcgtctcgtcccttttggccggaggatcggagttcagatcagccactccgcaccgagcctgacacactgaactccatttcttcctcttaagtttatttctacttcagagccactcaccctctcccttccaggagaaaaaaaaaacaaacctttcttactccttaaagtgagagattccccccccaccccgccccagcatcgcatattaannnnnnnnnnnnnnnnnnnncccccacccagcatcgcatattaatatctccacgttgggaacgcgttgcattttcttttttaaaggaatcccagccagggacgtttttctattgggcattaactttcgactgctttgcaaaagtttcgtattaaaaacaactctacctgaccgctctgagaattactagtttcttttttatatatattttttcttactttaaataacaacatcaacgtttcttccttttaaaaacatgcactactgtgtgctgagcacctttttgctcctgcatctggtcccggtggcgctcagtctgtctacctgcagcaccctcgacatggatcagtttatgcgcaagaggatcgaggccatccgcgggcagatcctgagcaagctgaagctcaccagccccccggaagactatccggagccggatgaggtccccccggaggtgatttccatctacaacagtaccagggacttactgcaggagaaggcaagccggagggcagccgcctgcgagcgcgagcggagcgacgaggagtactacgccaaggaggtttataaaatcgacatgccgtcccacctcccctccgaaagtaagtacagtttccgtggttttcgacttttccatccccgagtctaaggttggcccggagctcctcagatccacagcagccttaggcgttcgccctttcctctcccagtccccgggtcctgatcgcttcgtttccgttctgtccttcgtcccttccactgcctttccagtcgtgggatggagagggatccacaggcttgcaaaccttcaacttctgttttatttatttatttctccataactccctacccacaaatgccccagaccttttaaaagatgtttgcatttctcctctcccctggtctaccaactagcaaatcagctcccttctgtcaaaagaaaagcgcttcccgggatgacttatgctaagagaccaaggtagactttgttttctttgccgggttggcatgcagtgggggtgggggtgtcctccaactggtacacaaagagttaaaaaaagtgcttccaaactagccttctcaaaggcgccccccttccctgctgacctatctggggactccccaaacctttgctattgtctctcactcccctaagaatgtcagcatcagcaacaccaagctggatttcgggcgcacggggtgggggtcactcaaaacccttaaatcctccggggggtcatttattgctctctctgggtgtttttactctcagtcttcttgcagagccgcattgccaagtccccttttgacctcacgtggacagttagaaagaataaataaggttctaactgggctcaactaggtttcacttcccgttttttctaggtagtcctcgctagcctgggagcaggtcgttttttcttagggggattctccatgatctttttcaaccttgaactctgtgtcccggcactttcacaagcagcagggtcttctgtgtgttctgaaatcgaagatgggaaagacagctatttaaaaaaaaatatatatatatatatatttccccgtttcgctgggagcaatagcttcagaaacagctggcatacagtagcagcgatttattgtggagccttgtgggggaaggggagagtacagttagtgtagatttgtttcagagttctttaaaaagggggtggggagggagggagggagggagggagggagagagagagagagagagagagagagagagagagagagagagagaattttgcagcagcaacagcactgagtgatacctgagagggttaagcaccaggaagaaacactaaaagaaagagaaaaaaaaaaaacttcagcatccctgtgttccaagtccctgtcgtaaacttctcattggctgctctgttctctcctcccctttcatgccctatatccttgctggctgcctttgtgaagtctctgtgtcttgcctaaatagataacgcagccatcttggtaattttatcccagaagtcagaattgcagggaggtgcttttctctcctaatatttatttttagtttgacgagccatagctgtctgacttgccgcgtcttgcacttggtgccctcagagcgttggtctacccatgtgtctaaccacactctttctggtcacttctcttaccctgtagtgttctcttgttgtttagtgccgtaacagatgcagggaaccctggccagcaggacggttttattattatagttacggccctatccactacagtggatgcgtacagtccgccctgtttattgctcctgggaaataaggatttctatctggggtggagccacagtgatgctagggaagggagttcattgtaattagtccagagccactggggctgagggacggcttgactcagttagttttctcccacatacgtgtgttgattctgcagatgtttgggctgacagacaggcatgtgatccggggctgaataactccttcttcggtgtttacatgccaaagctcagattagctgtcaggaagtctgcaaagaggacaaagatccaatctcacattgcataggtgtgcagggagcaggccaccaggggaagtgcttcagtccaatggatgaaggtgagcagagaagggacaaccccagaaccaaggtcatgagcaggttagaagaaccgcccaggttttatggaggatgtgagggtatcaataacatcgatatgtggactcttctgtatcccactcctgaacctccgattaaatgaaaacctaagtatgcttacacacacacacacactatacatacacacacacacatactatacacacacacacacacacacacacacacatacacacatgtactatcatttttacgtgaaaactagagatttaagaagattgtgttcagtgtagaagcttaggagtagaaaggtatattaatagcagcggattcaacacaactgagcaggggctatggataatgttatagaaagtaggttaactgattttccaggactttctagatatagggagttcttccagaagagagagggagagggagagggagagggagagggagagggagagggagagggagagggagggtgtgggnnnnnnnnnnnnnnnnnnnncaccatctgaggggggagtacaaccctctctctttgcgcggaggttttcgtgcgagatagaatctacggcgacgcccctccccgagagttgtcgcacacccccggcgtcacctgtgccccccgcgaggtgtgccccacatatcgacgtgcacatctgatttgccggatctggtatctcgagtcgtgtttaacttaccccgcccgccataccgccccggcacatgtttcccaccacgtttgtggccgttgtcccccacaaaaataccccctagacttttccccatagggtcttcgcgcagattccccggcccggccccaccaagttacttgccctgcccccttggcatcttaaggcccctaacctggcttacctggggtcctcagggttttttcaattcagctctaacgtttccacaaaggttccccaggaatacccaataggactctatgcgccctccagcccctacgcagtgatctcaagttttagagccccccccccagtgtgcgcctactggggtgcctgtattctccgtttcaatacctgaccctttatcctaagcccttgctgaaggatcttcctgccttacatatcctcgggcatatactcagactcgtgctgacactacaaagcaagcgcttgcctcctcacatcgatgcccatacacataaattcacgggcacctacggcctttacctgggatccagcaccttcttcaggccagtccctgccctgatacagaggtgactccattctgcccactgaagttagaaggctgatgatccccaaagtcatatagatcgtgctaacgctagtgatatcaatgatgggggagtcctctccgcaggcaagtagtgatcaccatagagaggtagagggagagggaggcggaggcaggagagggagagggagagagaatcattccattgtatttaaagcaaggagatttggaggagcagggctggctggcttctatgccactgtggtgcatacagggagcgcatgtgcctgttacatcttgcagtgaatctgaagagggtcacaagcccatagagaagtcatgggaaagatcgccgcctctttttttttttttttccaccaacttattagtgttcagggagtgacttcaactcaagtattacaaatatgccctaattatgcttggtgactatatatcactacagacggctgatagcccttggtgggacgttttataaagttcaaactcaatctttttagcaatgtggagattgaaaaccgaaaatacaagagatattgtatatgccctcaggcatactttgtcttaaatattatccttggccaagtgtgctgtataaataagtagatattaatagaactggccaggtgccaagcttctagtatgaattttagccaagaatgtatttatgggggtataaataatactgtgtcaacatttaaagaagggatctgattagttttgaatttctgcatattgatcttttcgcatactgttggtttaagactcagagtggagttgtgctagagtttacggatcctgtgccctgcaggaattagtggataccaaacactttgactattcctttgaagttcaaggtgcagctattcaaaagacgctgtataaggctttagaaattctgaaaaagtgactctttttctaagaagactctaaattgatattaaaacaaatagagacccagtggggaaaggggaagttgttttctttttttggtctatttttcattatttacttatttctttgtttgtttgttttgttttaagtctgaggttctcccatgtaaagacatacttcctatcactgatctgtattctaaacctgtttgttaagattctgtcttagactgtagctgaagctgctctcagacttgtcttatagtttaggtcatcctcaaactcatggtcctctgccctcacctaccctagtgcagggattatgtgcactgccatgcttggctctcctctctgcttctcttcccagcgaagtgttgtgggtctaactctggcaacagtgagccctgctctctcctccccttgctctgtgtggcttctgctgtgacagctgaaaatgtctgaaaatatttttcactgtcttgaggtgagattctgctggtcttcattagatagaagccagggatatttctatcctattataacgaagagggcagcctaccccttccgccatatgccagagaattattctgcctcaaatttcaatgttgcccatggtgggaagccacagttccctggtgtgcagcttcggttgctgaattctactcctagtaatattttaaaaagtaatagcaacaacaaaatatctttatgatcaaaggatattaaaataaaatcatcaaatagagaataatcagaatagaatatggactgggctactttgtatgacatgttttttattgttgtgatattgaagctcctacatttgaaacaaccaacattcccattcatttgccttcagtaatggggttggtccctcattcaccaggaatgccaagtcagcacatagaaaacaaaaagaacccgaggaattatcttggattttcctttcaaatagaataagctttgtgttaatgaagagtggaatctgcagcctgggcaagcaaagacagtgacttgccatgtcggctggttctatctctgaatcaggtgggctgaagtgcacagcgtggaaacatcacaaagagttagccttggtagttctttcacatgaaggctaaacacttaatgctaagcaattctccctctctggtcctcctgtaatttccaagtgaaattgcgggatgtagaatgaatgccaatgtcagcatggttttgaggaatgtgacttagtattcaattcatgaagctgtctttctatatatccagattgctggcctaatgaagtggaatattagcagaacacagtagtagccttaatttattatttttttttattttgttctttctcctcctcctttcttaaagatttatttattattacatataagtacactgtagctgtcttcagacacaccagaagagggagtcagatcttgttacagatggttgtgagccaccatgtggtttctgggacttgaactcaggaccttcagaagagcagccggagctcttaactactgagccatctatccagccccgtagccttactgtaaagctgtatttttgccttctctcctaaaagattctctgtgtatgttcgtagatgaatgtgagtcagagacaggaaggggggttggtgagtgaagactagctaggacctcttgacttccatgatggcagttattaatgtacaacagagctgactctctcattccctccattaatgcctcgttgtggttacacccaagcacctctgcgctctccttcttccagatctccttcatttttactttgcaaagtgagtaggtgaagcatcaaattaaaacacagtttatagctggaacagggaggtggttttgctgctgcctctcttgagtagacccccatgttttaaagtctaggggttccccaaggttaaagagcatgtggttcgcttaactacaccctccccccacgtctccacagcgcctcctgtggtcaaggccagggaatgcaggtcttgaaagttgtcttccccatggtggagagatgcagatgtagcctcctcaggcaccttctgtgtaaagatatgaaagaatgacaaatcgtttttcctagaggaaatggagatgtgaaaagggctaatgattcaccgttgaactcccatcaaatctgggttagaattgtggaggtcagtactgcggggtctttgcccagagattacaacacactggaagctgtaattttggaaggttcgggaaggcagggtggaagagcccggggagaagtgtgcaaggaagggttcctggcctagatccttccccactgactctggcatcttcttcataaattcccaagagaggtgggcagcaagcaggtgcctgcccagggcagtcctgtccgctgctgtctcctcgcgtttccggtccgtccttaggtctcagtgaggaatccgctttgcagattcccagcagcctgacgaaatgtggctttggctgagacaaacagatgtttctgttgtcatttttttaaaagcatctggtgtgtttgtgttctgctctttaatatattttgaacagagatagtatttaacccagagatagtatttataaattcattgttctctgggcacttattttaaatttaataacatgatagggttctaggtcaggctctaggtcaggctctaggtcaggctctaggtcaggttctaggtcaggttctaggtcaggctctaggtcaggctctaggtcaggctctaggtcaggttctaggtcaggttctaggtcaggtttagaccaaaagattctcttgcagcttttgtttaaaagacatctgtgtcttgctccaacccaagctgccttgggtggttctttctttactaacctctgagagtcagaagtgggtgttagactgcactctggccaccggcttcctgtgttggccggatggctttgactccacatcataccctctttagcccctggcttttaatccaaattgcccctcaccctttgagatgatgggtatccctctgtaggtggtcaggccaccgtgcccatccgtatctagtaccctgctgtgttttggggatatggcagcccttcagatttctaccgggccacctacttctgcagattgcagaggtctgatgtgtgaagaagccctgggcagcttctggcacttagtaggcctctgcatggcagtcattattcgttgcattgcaaatgtcattgactttaagatgtaccattgctaccacaccaccagaaaggaagactactccagcagattctagtgcatgactggttatgagatggcatgggttcagcagtacttatatgagctgagatgtcccagggaaccacttctgcgttcttgggatgtcttggcatccccacatctttccatggatgttccacccagtgggtccagttctctggttcactctgattattcttcaaatgacctttaggagaaaggatggcaaggtaggtgacctcttacaccaggaggcttttgatgtcttcttaggttcatctctcttcagtagttagctctgtaaaccctataaggtcagctctgccttcatcctgtcctgccccgcctctgcctgttaccaacctgttagtactactttccggcaagcttttcttttggcttttatccatgcgcaggccatggattttcatgtctctgggtcctgtggatgttgcttcttcaactggattttgagggttgttgcagtaagaagatggcttctctgtaagagaccacctttgttttgtctgaatacatttgattggctcttgcgcaccccgagatcctgacctgtggtttactctcatttctgcctccctacactgtcttgtgctgttggatttgtagatgtctcgggttctctctgtccctacagaacctggcacactgtctttgctcaataaatgttcagcaaatgagtgttgccttctgagaatgactgaacctccaaagtggccttaacacacagtccaggaaacggactctattgcctttcctgttgtttggtagaaatggggtcttcatatgtagctcagaccttgggatatgtagtccaggctagccttgaactctttatcttactgcttctgccttctgagtactggagccaccggcgtgtgccactgtgggtagctcagcgtgactttccttgacctgaatccttgtgagaatgactctgtcctccagaggagcactgcatttgcaagttcagaatcgtttcctagggaaacaaaagtatctctgaagactgcaaaaaactggagggagttctttccccttcaacctattcagctttcatctgttcacttgattgatacaaaccttatgatttatcaagtccttggctttgacctggactgcaacccctcccaagcattctaggatgctttgagaaagttaacccatctggatggcaaaacgagcctgcgctttagaactcgataagaagtagaagcaagagaggaacgcgtggcaggagatggaccagagggagttggggtggagtttgtaaacatagggtcctgccctgagtctaacatggccccattgctacaagctttcagaactgtgccgtttctggccttgtagcatgggttcatgcttatcgcctgcctgggcttcgttctcagtttgttaagaacgaagtcagtaacagctgttactagtgttctgaaccacggtgtaggtgtagcacgggtgaggatacctaccacaactgcttctggctctcagggcttcctctcaccgtggcttcctctcaccgtggcttcatggtggttccctgtctcaacccccgcccctccccccttttctcccatgccccatcccctgctccagtgagtctctattgagtaaaaggaagcagggcattggagagagcactgccaagccaggtcagacagccgtggttaagctgggtagactcactttgactggagaccagctctggcccagctctgaattatgttcagaggcttcaacaagtgaaggaccccagagggtggaggaaactggaggagagggtacaagggacttcttgggagtcacctgaagtgatttgagaaagcaatccaaaccagtgacaaagggaccagccatgctgagccctcgggtcatgcttatcagtatactgtatgatgtttcctctgtgaatttgtgccctaactttcttggggcagcttgggaacaccactccactggtgccagaaaactcttctgttcaagaggaaattgactggatttaggtcctttggaaagaggagaagcttcgtggagctgagaaaaccctgccccgtggaccgctcccttccctttcagtctctcaagcagcgcttggacttgttaggcctgagaagttagaaatgtttggcttagatttttctttagccacaatgacttgagaaaccaaaggcagatgggaaatactctgtggatgttgtgaagcccaaaccatctgaaaatagtttgaatgcatttccaaccctcggcaggcagctgttttccttcacaccagccggctccatgcacccccattcccagggagagtgtctctgctgccgcaggccttcctggctctctccacactggtaattaggagccaggttgttcctgaagaggagactccacatatctgaacgcacagtcatggggtagctatgtgagatctgctctctggtggtgtttgtttcaggaagttctacaggacctttccagcctcatgaaagaaaaagaaaaatgcctgagttcttggctctgttcacgtggccttccccatcttgcccacagcacactgacaaacaacacatctgtcccaacaagccagttcacggatcaccatccattcataacttcaggctgccataggaaacctcattcattccgtcccgtgaacaagaatgcaccactgggctctgagcatcaggccgacatggtcccaggctggggagctctcaaaacactccacctgaaaacagcaacagctaaaagaactgggtagaggttttcctggtagattttaacagcactgggacatttattgttgccaaaatataagtgggagttttctgggaaatgcaatttcatttccaagctttggactggtttccttcttggtaatttcagtgcttctcagaccacgtgtatcgccaatgatcgcgtctgcaccagatgtcatagagctttgtcatttttccacgtgggggaaatccttcttcttcttcttcttcttcttcttcttcttcttcttcttcttcttcttcttcttcttcttcttcttcgggctgtccaccgttcatccactagttctatctcattgtcacttctgctttgacatcttcacgatcgccccggagttgtccctacttgatttataaggaatttctgtaattaagaggctagctcagaaagtcctgaaaattgcatacagtgtactctgaccctgggccagaagaagaaaggagcaatcccagataaaggccatttctttgcagaggaagagcttttatggaagggactgccccctgggatgtctcttgggattccattggtgtatctttgcacatccaagctcatcccttggcatttgaagctctggaagttgaggacagggacagaggaaggcgggctacaaaaccctttcatggtctggaagtggtggggcatcaccaaagctgaattccagccttcaatcctggaagccccagcacatctcaccttctgaggtgcctatgaaacccctaagttgctcctatctttcagtatcttgtttgtatctgagacatctggaagcattaagaacaaccagcaaaccttgctggtttgaacagtgcccactcttgtagcccttagtcatgtgattaggttgctaagtgtgttaactaaagtcactagatggacctaagggagatgcaccctgaacagcctctttgcttcctgcgaagcctgtgctgtgtcttgaacagggatgtattccagaagagttccactgtcagacagtatcgtggttagtaatgaaatgatgtgtgcagagccagatctcatttcacaagtgtgcaccatgcaacgagggccttgagtcaagccgcaggattgtcttgcccagtaacagttgtagcaacattctaagaacagttgaaacttgtagtttagtactgttagatagtggcagaacccagctgtgcaattattgttattaaaaagataccatggatgcttgaatggagagctggggagggtttctcaggaactaatttgacatgaagtttattgagacttttaaaaagatataattattttacgtgtatggccatgcctgcatgcatgtatgcatgtatgtatggccatgcctgcatgcatgtatgcgcaccatgtgcaagtagtgcctttggaggccagaagagagaataggatcccctgcaactgaagatgcagagagtttcgagccatcacagagggactggaaactgaatccaggccctctgcaagagtaacctgttgtcttaactgttcggaggaccgagagttttacatgacatttaatgacacccaatgaactccgcacagtattcccaggtggtttctaaaggaggcgctccaggagctgttgacctccttggccagatggaggtttctggaacgctttttacaaccaggagcggccagagacaaaggcttggtaatttgcattcataacaaacaccagaggggactcatgggcatagttaagtttgaaaactcctagttccactctttgcctcttagactctagaaaggccttttgctcagtgtccctcagggtcatccaaccagctacatcaaaggaaaagtgtccctttgtaagttgtgggtttgcttcatgtcttaccagtcctgggctaaaacaaccccagagctcttgtgagttacatcatagtctttagttattttatgaagggtctgtgctaaacattttatccccacctcgtagtctctgtaactcatattcctctttctcatcctattagtacccaggcccttttgaatgccatccatctcctctaagactgaatgtctctggtttttcacagcatttcttatgtcgagaagcatcatggataaccagagcttcatttatccatgtcaccgcttatacaatcacatagaagtttaataatgattattttaacagaggacttcttcctgtggccggagaagtcactattgacctctttatagagccacacagttggtgatcttactttcatattggcttccaccagagatccctttcttggggccctaattaaaaagcagacaatgggcaatagaataagacaagaggagaggggaaagggggatattaatattgcaacttcatagtgcgatgaaaacaaaccaaaggtgcatacttagaggattcaagaagagtactcccctctccttgttctcacaagtgttcctatgatctacatgactttgggcaacatcagccttctaacttcagtgggcagaatggagtctcttctgtatcagggcatggactggcctgaagaaggtgctgtttcccagggaaaggccttaggttccccccaagtaatgcatagggccatcatacagaggagcaagccgctggctttgtatctctgcccgtctctgattatattccttaagatttttatttaggataactttcagcacggctttgtaaaggtcagatatgaaagagaaaagccccctttgctaatcttgggacaaacaatttatatgcagggtgagggatactctccctatcagactgtggagaaactataaaactaaacagtacagtcgcttactggggcagacacatggccgcagatgcgagctggaagcagcatatggtagcaacgtgacagcgccatgcgcagagagaagatcacccatagccctcattgtcccagccacaccagctgagtggagccccatttccaaaccaaagagtgttcttctgtcttgaaagccaaatctgttcatgtgtgaacatctgtcactggggtcttgttagtgggatgaatgctggagatggtcagttacagagtgtgggaagagctatcgttgtctaaagtgcagtgggaggaagctcatgctggcctttgtcttgtcaaaagtaggttctagtcaggtctgaagggtgccagttactcctggaagatacactcatacagacatacaaacagaaggctcgtggattctaaacctgggcgaactgccggaacgagactgtatccctactggatctggatgtaggcttcaatcacttcacaaactagataactaataggattgcatcacgagattgccttttatctcccagtccttaaaatacggcatcttgggggcgggggggggggggggacacgtttgttaacccttgaatacagaagcatgggtaaattcatgggaaatcaacagattttaatctgcatcttctctctcttacacacacacacacacacacacacacacacacacacacacacacacacacatcaatcctgttggcaagagggaagctgctactttgaacattcagtagtgttttctcttccctttgatacacatgcatacatgtgtgggttgttttgttttcttttcttttctttgttccggtgggtgtgttttgtctctgagaataagatggcctcagttaagtccaattgctgctctgttggaagtcatgacagctctgttggctatcaggacagcgagctctatctctttcaacatgtgtcagcatttgaaaccatagatccacagctccaaaccagcaggcccttggatttctgacccataggtgaaagggttttcatatgtggagaagaactaaggccaggtgctctttaagaaccgtgaaatctaggccagccaaacagaagttcaagctttgttcttaatgataggctgtctttcatccaagtgggtaaaggcctttcccattcctctttagtctaatgcaaggtattacatttccccagttcagtatacaaactgtaaactgttgtttcacgacccgtgcacctttacgggacaattgtgttgagcaatgtgggctgctgggtaaggcatgacatgagatcaggagctagaaatcaagggtgggagttgagaattggactgtttaatgtcctattctgggtaccagatgtctgctgtttggagggatggtgtgtgggggatggtaagactagccagcaagtcccttttctacttggaatcttagtgtagttctgggctgggcatgtcttcagtaaaatagctaatgactgctttttaaaactcctagctgtctgcccagttgttacaacaccctctggctcattgggcagcttttgctccagacagtcccaggtgctctgtgggtaccttggtgagtacacttgtccactttattcctcctttgacatggtgataccaagtctttttttatatgtgcctccagtggggaattgattggtcagaggggagacaggattttgagaaacaacttgtaggtgtgcagtcacaaaagtgcctggaattttctagtcagtttcatgagaataactgatgactagctttgaagtgacacgctgcctcatgtgcaagaatgactactaccaagtgtgagctacgtgtgccagggatcacaacaggatttaaaatattgatcctttgatccccacagaggccatttcctggagtaaggcctctatgttaatggggagggggtcccttttgcagactttgtgtgtgcattcctgtttttgacacactgtagctgttcaattaatgcttcttatacagaaccagagggaaagaaggccacccccacggccctgcccttcagagtgacagaaggaggcttctgggagagttgtgttaatgccatcatctctgattttcattgttgacatgtctgagttgcatgagaaaaatggattgtgataggttagactctcggctagctgagcctggagaccaggtgtaagcccctaaccaccacatgttagaatgcgggccaccagaaccacagatctctacttctttctgtttggaccatcaactggttccattagcactgattgaatgtgtactgtgttctggacagtgagtccacaaaaaaatcagatttgagtaagccaacactcttggaattcagtggttgagttgtttctgagccatacacaggaagaaaagaaatagaccaagttaggactcttgaaatgtgtgtggaggttctacataggcatgggggatggaggagggtgattctcctgagaatctagtttgtaactctccatgcctggccttgcttcttaggaacaactgttacatacagtggctgcagctgaggttttctaatgaaaaaccaaaaccaaaaccaaaacaaaacaaaaacaatggtcccagttctgttaagagtgtatgttggtggttttatttcaatatggaagggcccacagtggctagagggaacagtggaaataaaatcagtaaaatgttgaatctgcactgagatagctcttgtgtgggacaaattacatctggtttctctgttctgaatttttatttcattccactctctaaacctaagagttaattgtgccattcattgactggtgtttgggggaggagaggatggaagcaaattagtaaagacaaaccttggtcaaatcctctctacagccccattacccaggtcacccacccatcctaagaccgggttaataccagaatgtcattggtcattgttgtcattgtcttcttcttcttcttcttcttcttcttcttcttcttcttcttcttcttcttcttcttcttcttcttcttcttcttcttnnnnnnnnnnnnnnnnnnnnnnnnnnnnnnnnnnnnnnnnncctcctcctcctcctcctcctccttctccttctcctcctcctcctcctccttcctcctctttttctcttcctcctcttcttccttcttcttttcttctccttcttcctcttcccatcttcttttccttctcttcctctttttctttttcttcttcttgtaagaagaaattgtagtgtggagcagtgagtcccttgtccttctctcaaagctagctcgtagtgaggctgacattggaattcgggggtgacctggcttttctccaccctaaccacaggctccaaacctgtgcttttgccctctctggggacccaagcccattcgttttgtaagtctttcacctactgcctcagtagaaggttcctcccgctctcctgcccagcaaacaggctgagttctagctagcaatcggtttgagccctttcccagtttctagacaagtttttctttttgcattctcccatttggttggagttattttcagttagtaactgcccagaatttccctcttcatttagtgaataagacatgctgtgaaactccagcactcctctgggatgctgcagttgtcttgaatatctctgaaggtgaaggaagagatacagggatctggctttgatagcttcttgtgtactaggaggcttttccaacccacatgacaaatctctttcaggtcttccaggcaagaccccttaacagaggaccaggagatggctcagtcagtaaagtatttgctttgtacttaggaggacttgggtgcagttctcggaacacatgtaaaaatggcaggcacgatggtacacacatgtaacccagggagttgaagacaggagcatacctgggcctcattggccagctcaagagtcatccctgtcactttgtttgaactgttcctccattccaaagagacattgggcacagacagcagcagtagggtgggatatctgcctttctttatcctgtaacttgagggctggtgacatctaggtgtctgacactggcgatggggctgatctgtacaatgccctggaagagaggaagcattcagtctccttcccatgcttgtcagagatggtgatcttgtagaacatcatccccgattatctgtctatctatctatctatctatctatctatctatctatctatctatctatctatctatctatatgaggttaacttgtgtaagtgttttctaatataatacaaaagctggtctccaaaaatctgttcaacccccaggctgggcctggcctaggatggctacagatgccgctcaacacaaacttacttaaaacttcatgagtttttaaaaattcaattatgtggttcccaagggagatctttgtaaatggcaacatgcttttgcaaatgtcagaaggttggatgtgcccaatcctagaggaggctgggtgtggggagtctatgtctatcattccaggacactagtgactccattaagatttaacaatgagagctggtgagatagctgaggtaagaggccccggttttggttcaaagtaaccctgtagtggctcacagtcatcagtaattcaagttccaggcaatctgatagcctcttctggcctccatgataccaaacacaggcatagtgcacaggtgtacatgtaggcaaaacacttgtacacacaaaagaaaataaataagtcttaaaaaacaaagatttaaaggcgccattccaagcatatcctgtgtttgtataccccaaggcagcttccctgggcctgtcccagaccagtggactcagaagcactgggagggggcagctgggaggttgcagactctaaacagtctgcaggtgctcccgatgtcactgaagttggcagctgtgagagccaggggcccctctgatgctgctggcctgtttactctcagaggcctacatggcaggcaggctttggatgctgtaggacctctgtttgatcagctggtgctgcaagggaggcccctgaacccacagcccagtcggagtcttccctatgtgccttccatttgccaatgtacctacaaacactgaggtagaactgttactaaagcatcgtgcaaagcccctgcttcagattcaccacagggaagggctttgagtgtatggggaaatgatttaggcacatggtggggggggggggaggtgcgggggtagcagaggccatcttgaaatcagataagggagtgatctcttcattcaagtgccttcaaccaggcaactgtgaggtatgaaggagattcttttttattttatatgtgtaaagttgtctcttttctttctttgcctgcgtgcatatatgtataccatatacagtccccaaggagcgcagaggaaggccttgaatcttgcaactggagttgtgagctgctctgtagggagtgggaaccaaacttggctcctctgtaagaacagcaagcacccttaaccactgagccatctcttcagcccccaaagtgtgtttaatgcatataagataggtatagacagaatataatttcccagggtggtgttttgtccaaacactgaggtcctcattgtgacctgagttctcattctgacacatcccatggaggttaggatctggccaacaacagaatgtaaactccactgtctgaaccaagctaagcttcttctgataactgcagtttttgctttccaaatgatatttttcaaaaaggtgttagagctggtgagaattaatcattggctttgtgcaacactgtgcctcccagagttctgatgcgactcttgagccacccggggttctgagtcttatcctacagtaggaacatttcagcatggctttgacttcagtttcagttagcacaccattcagagaactgcccagttctcctcccatgacttacctcactgctgcggcatgagacccactgggagggtgaattttactccacagcacgcttttaatagaaaggtctctacattaactacagtcattgagagaatcctaaaacaaacacccaatgcttgtagccatcatggaaaaacaaaaaagtaaagaggggacttcttagaagaccctaacttatttcacaaaatttatggagggtctgctttcattgagcaccactgtagtcatgatattgccactaagtggataccacggaagcaaaccgtagcctttagagctcctaactctgccgatagaaggcaatcagcagcaaagatgaaaggaaaaaggcgcaatctgatagatgtgcaagcgctctatgggcaagacaagagcaagggggtggagggagagatgagtaagaatttcacacaggcagggcatgggagagctgtttaagaagggaatgttcaagcaggtcctggaaggagagcagagtgtctgtgagagaagaccatagctgcaagggaaacagccagactgagctggcatagcctggggctctcaaaagtatcctaggagagggagtagaagacaaatgaaggaatgttcatgcagggtcctgttggccagtggagagccttggctttttcttgaaagccagggtggctttactaaaagtttactgtgcctgctgctttgagaatggagcacagagtagtagcccaggtagaagcagaaagtccagcaagatctttgtaaggcatgggagggagaccttccaaggacactcccatgtaaatctgtaccataatgatatttgtgtgcacaggctcatgcgccatgaacattcgtgtatgtgtgaggggaagccatcgttattttggtgtagggtggcaggaggagtggacaggtaccacagatgtgcatgtggtcaatgtagaagtcagttctctctctttggctgtgtgggactcaggttgcccggcttggctgtggggacctttacctattgtgccatctcactgtccctgattgcttttaattagtaattctgagtaatcagtaactcacttctttctcctctgaccagaaactatcccggcattcttccctctgtataggaaaacatctcccaaaacctcccatcctggactgacaaacttgaaaaggcagcttttggaggagtgcatgcttgttgtaacgttcagtaatagtctcctttgactcagtggccaagaacacagatcactcataggtgaccatgccttagcctccaaggatgatagtctgcctttcactgtgcaaagcagacagccagtctcccaaatctttgggtctgcccagcttagcccaatagaagaaaataaaccgagaatgcctttctttaagtattaaagtcagttcttaaagcagggatcatgtaaatcactcaaaaagatttctgttgggccagatttggtgtctaattcaagctctgagcacaaaggcttcacactcggaggttgatttcattcctttatctgaacaagaaagatcaatggagtctacagatggccagtgtaggagtatagcatagactctattctcgtttcttctctattgctctaacaacaccatggccaaaagcaacgtgggggatgaaagggtttatttggctttcaggtaacaatccatcattgagggtagacaggacgagaacccaaggcaggaagtagaatcagaaatgatgaaggaaggctgcttcgccagctcctgtttagctagtcttcttattcagtccaggacgacctacagatagtgccgcccacagtgggctgggccctcctacatcaatcaacagtcaaagcaatagcttatagactttcctgtttggtccaagtgtttcttcacctgagcttctcctctcaaatgactctaggctgtgtctagttgacagggttaactagtacagaccctactttcagggaatctacaacttagtaaggaacttaggcagtccaaacccaacatccaaacaaaagccaccactatgtgattgatttcaagcaaggcatcccagaggccaaaagtgttgcttaacaatggcttagggagataaaggacagcttcgagagggggatgggacccagaacctggaagatgacctttgagattgtactttgtagtttggccatctggcagcaacaggaagtgtcttatgttttctggaaacagatttatcctttctggtgaacttgtatgacaaaagtcaggaagcggccatccaggaaaacttcccagggtctttgaaaaatttgaagtgtgtctacaagagccgctcctcttgtaagtcttgaaagactgaggctggaggatagaattaaagggttatacgaagggcttgcttttcaaagttggttcattgagaagatgtatttagcctaataattggagacatgcacaatgctgtgctatggtagtttggactctgtgaaatacagtatcattcttaagatcaaggtcaacctgggaagctctgctgtcaatcccagtggccaacagtaaatgtgtatctgttactcgtattgttttagtatgccttccgagccagctataccatgctccggaagatctccattcagggactctgtcttaggcatggtgacagtccctacccgtattgcacaagtcacatggccaagactgactttagtagcattaggaaagggcacagagagaggatgaggaatgtgaggactggcccacagaagagtgtagccaacattttaaacaaatgacactgtctatcatagggtaggtagtggagttggcaaagagaggtgctttcaccaggcttgaaatttttctatattgtcgatatgaactcggtccacactgtgtctgtacagctttggaaagtgagtgacttgatgttacaaagatagacatacatgtcacttgcctttattttcataatggcttgtcccctcagtgaagacacatgtttctggtatcagaggcatggttggaagaatgctgaaataggcttacccccaaagcagtgacctccctcaccttagggtcctaaattgttgtcctagttctgacacgcccagaggtgtctgtagtagaggttgtccacagctaggattctggctaatcatctttgaggctctgaggctctgagtctctgagtctctagcagtttgtgagagggaaccagatctgttccttgtatatcttatgcgaacgtcattctggcttaagcctcctgtatcatgttattctctagaactttggtctcctgatagtgacacttcaggtacagattttagagtcaggctctcgcctgctgtactcagtgagcaaactggaaagtaagtagctctggcttgaaagggctgctgctgtgtgattccccactgccatgacagctctctgctctgaggacccccgagtgagcaaggtagcatatgtcataggagttcataaataaccatcggcacagcctattcttagtagcaacagatgctaagcttttccagcctgctctcgggggtcaatggtgggaaggagaagaaaaaaatgaaagcattgttttgcacacggctggacatctgtatttctgaattgccctgttgtgtgtatgatgcaatggccggagccggtctgctgaatgtgaactttgtccaccgactggagtctaaattggttttggatccttctgaaatctaaatggtcagagcatatttttctaatattcagttggattgtgtctttgctccagagtggagctgactccatctgtgctcacagcagcagcagcaggggtccttctagtccaagttgcttgttttcccaagactgactgctactgactttatccattgtccttatctggggaaccttggaggtggcccccagaggatctgagactgtggtgacttcaagggtcatcaactctagtagcattcattgttaggaagcagaggagtttgttgttcagacactgggcaaggtgaatcaccagcatggctacctacaggtgttctgactctgtctgagctccacaaagaaaagcactcatgtcctggcatggtagcgctagttcagagttcaagcccccattgtgcctccaagtcaactgggaagcctacatcacctgtgctacagacagaccaactgcagaagtactgacccagtcatctgtggagggtcctagaatctttagctttcaaaaggctgtctaggtggtctgggaacctgtttgtggggaatacctattgcttataataaatccttgtggttctgcctagctattttgttatattttgagggatctaggatgggagtgttgattggcggagagagtggattctgacattactaatattataaaggcaggacatagcacaggctgtaaagggtttacatgagggttccagtttcatctccagaacccacataaaaaagccagttctgtgctatgtgcttataatcctagctttggagtcagtggtggggctaggaaacttagtacttgagtttgcaagggctgggagaagagaagcaacccctacactcactgtagccaactcagcctgctaggtgagttcttggccggtgagagaacttacttgtgtcaaatagaaacatggacagcaagcgaggaatgacgcccaggttgtcttctcctttctacctgctaatacatacatgtgcacccacagatacatgaagatacacggccaggtacacacctatacacacaacaagcaaaactctgaatgatgttgctaatagtagctaattagttgggtcctgggctaattaatgtctgttttggccctatatgtgaccacggttattcagttttataggcaggaagtatggcttacagatatcccctgtcattttcccatagtcacccagatgatagatggcagaggcagagcatgaactcgggctgttgtctgactcaagaggcagctctcccttaagggatacagctttaagtttaagtgagattttatttgtaggaatgagatgacagagagacagactcggaggcctgggagccatgtgtgtcttgtgtacaaggaagtcgctattttccaggaaagggaaagatgtgttctttttcttcttttcggtttcttagctacagtatatctctcttagaagcttgtgacagacgtccatggattcaaacacagacatcagggtgaagcaggggctcatgtgtttcctttgaagagcaaaaactaattttttttttcctgcacatgagatgcatgacaagtgtgttatcgttctccctacattggtcaataattatggtgtacaatatacagtccttatagttgtgtagacaatggtgatggtttttttttttgtttgtttgtttgttttattttgttttctccttgttttgttttcagcctggcgaatttcagcactccgcacttgcataaagagtgcattgattctctaacacttactgctgaaagattagcatcctatcagcaccagtaggatcaaccagtaggtctcaaaaatttccatagccatttctgccaagccggtcaatccccacacatgggaaggaatgcggcagattcgggagcccaataaatatttgttaaatgagacagggactgagtttttttgcaagtgtgcaccataatccttgcaaggcactgtgcatcatggtgagggcttctgaaaaagagagagagaaggcaggctttagtcacaggatgcctgaatttctccctgagtggcagactggccagctcctacttgcctacctggaggaacactgtgtcccctaagtgtagcagtactaattaataggctttaaaataataataataataatttgaccaccaccagcctgtgtttccatttctctgggctaacgaaggcatgctgactcccccctccatgttgtaattttctttctttgattaatctcgttattggccgttctgtatgtgtatataacgtactctaattattctctgccctatactctcccgcacatcccaggttcatgattttccattgtgttttataacccacttagtttaaacaaggcccaatagtgtcaccagtgggtacacagctgaaggcaatgactctccctccctctgactctatcagcagatagctcaacagtgtggcaggcagggccccttcccgcctcccctttccatgcccagctgttaacaataggcccatttttgtgtagatgtgcatctgtggtgagggtgtgattgtcatggcagtgtcttgcccagtggtagactttttcagctcttctccctatctttctgttcttacattctttccgtcccatctcctgaagtgtccctgagccgaggagatggcacaaatatcttatgtgggtctgagctctcagcaatcatgtatcctcatcccatgtacagcccagggtctctgtattcactcctgttcaatggtcagaaaggcttctctgtttacgagagtaatatttgtctagagacatacacagaaatatttagaaggcagttagacattttgtcagagttaataccttcagcaaagaggcaggatacggacttaacatataaaaaaatcaatagtctttctacatgctaatgataagcacaccgagaaagaaatcggggaaacgctcctatttgtgatgacttcgaaaaacttactttggaggaaccctaactaaggaggtgaaggacctctgtagtgagaactttataactccaaacaagaaattaaggaagatgctagatgatagaaagacctcctgtagttgtgaattgtttgatattgtggagtcccaccaaaagccgttcatagattgtgtgtaatcgcagtcaaaatccctatgctatttttcaaagaaaaaaaaaaaaacctatatagcatttttctttttataagttaggggaagtttagcatccctggggctctgaaggagcagagagaagagacgttctagccccagcccatatgaagaggcgtatttggaggcttctggtccccagttgcaggaatacctggatgagactccctcggagagttcaagctgctgtcacgagggctataaagggacactcaggcctgtgttcttgtatctgtagccagccttcaccagagtatttttagggccccctttgtctcaatctgacttctgcttgagacttttaccacatgtcgtctgtgttgaaatgacttttaaactactctcttagccgtggaggaggagttagaacagaactgcagcctttaaatagaggggttttttcccttccctttaatttttttttttttttttattgctaaatatccaacaggctgaatggaggaaattcaagtctaaccctggagggacccctgtttagtcatctgtctagacagatgagtgtctgtaatgggactcccttacttttgctttgtgggacagaaggtggtccttccagttcagctcagaagatgctaatgttttgttttgttggttgactccctccctccgcaagcttctgtcaataagctaagaaagggactcaacctctgatggacaattgtcttgcgtgtgacaattaaattatgaactagtgtcgagaaactataggcttttcatggagagaccaggttaaaatccagcaagcctgttcccctctcagagcctcactttctttcctttaaaaggtggatttttttaattgactttttaatgaatttttaatgaatttttaatgaattttaaagaagagattcacaatacttggtccctcagaggggctggccaggtttcccttcttttattcatttcctggccactgttgaagccctcaacttccctgcttttctgttgtgagaattcgattgaaaaagtaggagtgacagctcatgtttttagaaccacactgttgacatacacaccgagaggtgtgagcaatgccacctcatggtacagaaaagccaagagagggacaagtttccaggagagtatgtaagaatgttacagatattgtttagaaatacgaggtatctaaagactgtcaaattcagaaatcccaaaagacatggcagctacgggggaggtggatggagaaagcatctgagcatggggattttagactttcagttaggcaggaagagaactcctgaactctaccatacaacggtgtggtagctactcagtgataggactgtgttcacttaaagcagtagagaagatatgaggtgagcttccaccggctgcactccagcttcctcagaaagactggtcaaagccttgaatagggtagagtggtattccttgtcagggcagaaaactgagagctcacctgaaaggactatgtattagcaaggctttcccaaagtagatagcctgtgtttttaaattgtgtgtgtgtgtgtgcgtgcgcgagtccgtgtgtgcgtttgtgcatgcgtgtatgtcgtgtataatttgtgtgtatatgctctttacatgtgtatagaggccagaggaggacattgggtgttttgttctatctcctacttccttcttcccttgagataggatctttcactaaggcggaagctactggcttccctcctagctctacttccctataggggttacagggattagaggtctgtgcagccataccacacccagcttttaacacaggtgctagggactgaactgagggcttgatggttagcctagcatcccacttcctagagccacctcctccccgccccagccccgcccccagccccgccctgccctttgccccgcccctgagtggatagcaaattaactatctcaccccttcaacctcttggtttaagttcttcgtggattgtccctgaaagtcaccacctggaacatttttatctcatttattcagttcattttcaacatgcacgcactgcattgtgggaagaccacttgcttggaagaggaaaacaggcctcaagcagaaaggtgcaaaggtcctgccgagtggactgtaaagcccagacgtctcaaggccgatagacaagagaatgggcaagtcctcactcggatggcctatttcagatccttggactgtccctgctgctgctgctatcgatctttctaggatgtagggtttatcacggaatatggtttggccaggtgtatgagaacacgatgaagccctaaggagtgtaagacccgcctctcatccaagggaactgtggttgactgcggatgtgtttgaccccacacaaatgatcctcctctgagctactgtgtgtctcagatccatctgtgtcacactgggtgaagccgctttgagacgtggatctgcaggcagccagggaacttgaacttggctttacacagggtcgaggctgcgtgtttcttactgttgcagccggatggacgggcaggctgacctggcctggccggtgtgacatctggccacagtgccctggggcttccctaaggtaccctgcataccttacatacctgccactgagatcagagacgtgaacatccaccagaaaactgcctccaaagtccctcagggtgatccacgtaggcgataggctgcacacactctcaaggaggctgctgtttttggccactgcatgcggggcccctatgaggaaaggaacctgactggcctaattgactgcagaatttttattcattctgacgtctcaattttgttagccctgcctttcggcagttagtattctatttgttgagatagacttgtaaaaggactatgacacacaacgcagaatgttaaaaacaaaaacaaaaacaaaaatggatttataggctcagcacaatgtgaacatacaggagaggtggcctggctgacaaagccaacctgtgagggaaaacatccctcaggttcagagagcccaaatcagccacagccacaggaaaggaagggagagcaagctcttcagcagcagagggtgagaagcagatacctgtgacgtcagcaaaccttttcccaccccacgctgtggttcttgacatccatagccgctgattcccaccagagcccagtgtttcatatgactgtggatacggtacctttgagtcatgtctctttcaatacaacagcaatcaataaaaatccccagtaaaatgtggttaaccacaaggacatccctccccacttccactctcacccccacccccacccccacgtcagcactgtgattcattcagccccgtgcttctaatattatgtcaccctgggaggtatgtacccttcttcaagtaaagaacagaagtgccactcttttctggctcccccctgcttctctgcctaggacccctgggaaggtgagacctccccagtccctgtgtgggtggctgtgcccaggggaaagctctactctcaggataacaggatggaaaagatgaagcctgcaatcccctgaagatgtcactgaattaaaagctgctctggcctcttctcacatctccattaaaataagtgctgagcttaggctttccctggtaccacctctgcgtagctccttagaaacacatacagtttggctatgttttccttacctgttagggaataaattctgactacctggggagggatgggtgaggcaaaatgaggcataatgaaaggtgtagaaggagaagccatggaaagaccgctcccccccccttgtgtgtgtgtgtgtgtgtgtgtgtgtgtgtgtgtgtgtgtgtgtgtgtaagagtccagctattacaacatctgcactggagaaggccaggatgaacgcttacaggctggtctataatataacttacacctttctttatgtgcctttagtttatttgataaacgatgaagaaaagcccccttgaatctaaagcttttccttaaggagccagttaccctttgcctagaacaggctgtgttccttttagccacacttggtgcttgctcagcagtaacagcgatacttaggagagcttccggtggccagcatttgtggagacttgtgattcatttgattccggcagtcatgagatttgtattttcttcatttctctttgaagaaaccaaggcaaagagaggctaaactactttttcagatgattaaatggcagaaccatgacacccacccaccaaagatatcaccgtctctcactcccattaaggggaagctcaaggctaattatgtcacccaaggctccgatgtcattaatgtaccatatcataaacccttgggagaaaatagcccaggtctgaatagtcgaagaaagagattcccgtctagaaatagattcattttgacctaaaatttttagtcaaagtggatcgaatatgctagggtctcaaactgaaaggagacaaccatatgcaaaattcttgttaggagcctttacacacacaaacacacacacacacacacacacacacacacacacacacacacactaagtcctctgattatcgagcagtccaatgtttataagctggaagattttcagtatctttatttgaattgcacaaagtggccaaatgtagtttggccccaggctgcagagagtgtgtgtcttggtgccaagacactactgagctccgcctgagataccgaacattccaggcctcttaccttgtaagtgtaagatttaacagatttcacccccccccccaagatgcagagcagagactgagcagcataggtgctgagactgagcagcataggtgctgagactgagcagcataggtgctggatgtgggctccatagtcagaggcatgtttggatggggggttacctgggaaagtaaaagaaggattgccacaagcaacacaactcgggatctgggaggaaatagcagagctgaaccacttggggtgctcatcacgtgctgggctgtgttgaatattttgctttgatgcttttatctctattttatcctcaccatctataaggcagactctgctaactcttcctctatttgtgaagaaagtgcagctgagtcacatgtatgacccactgttaaccctgtgtgtgctgttctaaggtccctggttaatatgttagcgcagctagctggtataaggccagcaatgctaataccacatcctgcagagccaaacaggcccaggaacccactgtgtcttccattctttccctttccttaaccatcccatataccctaggagtcagatgttatggtcttaggttcctggagactgtgtaaacggttaagtcatttggtaaaggctacactggtgtttggtagagccaggcttgaatccacgtgtgccagatcccaagccttaagtctctttacatcttcatttggtaacgatgacaagatcacagacaaaccctagaagtctgggccagctgggatctctgtgacatccctgaaggagagtaggtttgagggcaagcaaggtggctcagtgggtaaacatacatgctgccaagcttgcccacctgagttccaaccccagatccacctgggtgaaggaaagagacaacagctcctatgtgctgtccttcaacctatatacatgctctgtggcgcacacacagacatgtgcacgtgcacagtctcactcacagatgtgcttgtgggatttgaggcagcgttttagaggtttgtattgaccactgtgtctgtaagagcttccaatgagatcttttaggtatgtgtgtctctgtctgtgtgtgtgcgtgtgtgcatgcgtgtgtgtgtgcacgcgtgtgcatgtgcatgaaagcatgggtgcgtgtacatgggaacatgcacatgcaaaggggcatttgagactagggcaggggagaattagtttcagattgaagaaatccctcggtgccagaggagtgcccatgtcttgtctcagctaagtctcatcccttcacctgatgacctaaggttaggagacacccagtgggttgcgttgccattgttagccttaatttgcccacagaataaccccacattcactttgatgtgcttttgtgaaaatgcagtcttctttcttgccagacaaggtcctcatgagcccctccaccccctgcagtgccagggctgccttccaaagtggctggaaacacaaacagaaggacctcgctcccccaggccccttgcaggagttctttattctgctaccagtcctttcgcctcagaagggtctgcttaggttgaatctcaccccaaaagcaatatttttagctggaggtggaaaattctagaagcaaaggtgtgaagtgaagctttttggtgagtcgtgtccatggaagagcagccatccctagcgtggacaagatgtgctccaagacacacatttaggcacagcagggctgtattcacaaaggtccttgatggccaccactggctggatggctgtttctaagcaaccactctaacttctttagtaaagcaaggagtcagggtttttctttgtggagaatcgggtttctctctgctggcctcacagtgccaatgtgtcctgtgaacaccggggtatggggaccaaacccaaaggatgattttccataattggaaaccataattcaggtaaaagagagataaaaggatgaactggaaatgaagcagtgccctttgcgtagagaagtctgagtttagaagctgaattcttcaagccgtcagtccctgttcctagcccaaggctctggccatccttgggcaccacaggcatctctgctcttctgagaatgtcccgttgcaaatgctgtcgtggaaggcacgggctgagcttgttctctcttctctactcaccccgactttagaaagcaggtatctgtgacacactgaggggtccgttgcccagtccaacctgactgcatgaatgggctccgttctggcagattctgaaatctctgctggtcagtgtgcgctggaatgggcatgttcctgtgactctgctaacctcctacagggtgaggccgcaaagcatgggtctctcaaaacgcctctcctattgcagtagcaatctacatgaaccaagacaaggatgaaactgtccacaagtgactgctgacttgccttccaaaagttctgtgtgtgtgtgtgtgtgtgtgtgtgtgtgtgtgtgtgtgtgtgtgtgtgtcacaggcaatgaatgacgctgggcatcttgataagaatcccccaaaaactgacactccttgtttgagctgtgtatcaactcaccaatcatgaatgtgtgggtgtggttttgtttctttctttttcctttttaatcaaagggtttaaccccagctattgcataggggacttacaagacgtgggacacaggccatgagtcaggaattgtgaagttcgttcgaagttgcagtagaatcagccagcaccttctgaagaaatttccatggagggtattgcaagtaggaagtgctcccttcgaatttccccatcaggaaaggtggagcttgaacatgtattgggggaaaagccccgcattcttacactcagagtcactgtgcatcgtcccaggcgtgcttgctctctgcctttgtacccttcccacacctccgagtttagcatttgtgcaaactctgtggttatgtttaatagttctcgggcaaggagatgtgcagaaggcttatggaaaggttatttaaaccacatatggcaattcagtcaccttccagatcatgttgatgcattaaaaaaaaagaaaagaaaagcaagggttggagatgtggcttagtggtagagctcttgtccagaacaggcaacgtcctgaagtccatccctagccccaggggtgaggtaggagggagagggaatgccattaaacatcataagtattttgaatgccttgaaccttgggtatgtgtcttatctttaatgaattttgttatcataattcattgttttacaggactggaggttcttttctttcataaggaattaatccaggtagctgtgcgtattgaagtagattcaggacaatgagagcaacacagtggaaaggcattagcattgcatgggatatttgaaagtaatagacaggcaaggacatcaaacgcactctagtctttcttttaaaaacatttaagtgtgtgtgtgtgtgtgtgtgtgtgtgtgtgtgtgtgtgtctatgtgtacttcagcacagtgccatggaggctagaagagggagtcagatcccccgaactacagttgcaggtggcagtaagcgttcagatgtgggtgctgagaacacagaccttttagaacagcaagcacctatattttgggtaataaattctacctgaatcttaaaaggaaggcctgacagtgtactataaaccaatgctttcctggctccaccacctactagctgtgtggtctctgatatgtttagttccggcagggtggtactgcagtgtaagcaaggacttgggagccagggaagcccgtgaaggaaaggaaagggttaaggtaaagagatcgcaccgaggcggttgcttcagagactgagaagatgtggtagcaagacagagaaaagggtgtgctccaggcctttggcacttgataaaatggagttgtgtggttcagtgtggctccctcagtgaaagctaaaggaactgcctcactctcctaagccttggttctgagccttagttccctcacttgtaaaatggtaatgaagaaaggattgacccgggaagagtccttcagacttggctactgggattgactcttgacctactgagtcaccgaacttcaaagttcatggacagttcgtgcatactgtaggttctgaccttagaagggtggatggtgaaactcacatctgctctcttaagaactatggtgctcttgaacttgaggatgatctgtgtggaggatccacaaactaggatttgagaatggactgcaggtgcttgagaggtttccggggagtgctcccctgcattcccaactgtcatccatagaaaccatgacagagtgatcttatctccctcccagcagaagtgggtggcttacacactgaagcctaagtaatcccttcccagtttgaggtgcatgtggtgagtgggaaggagagtttaggacctgggtgttgccccttctgtcccctcactggtagtttgtggtggctgtctctgggcctcagttgccttatctgcagactggaagatgaaacttaaaagttaaggaccagagaattagataaggacatataatcagatgggcatctgaggatggcttattcaatatgaattagcaagactgcttcctttcatgagaatggccttatttgattctggctagagccctataaagtgacccacagttgctacacacaagattgagtcttcctcaatgtcgcatgacttcagaggccagtagaaatttctcttaagaggcagcagtccttggtcaaaacctttgatcccttggctatgcgacttggacgattttccatgaagggtttagcatccacatgtcagaaccgagactgaagcctcttttctgtgctttagcagatagttatgaatgggaaacgatgatagtcttggctgcagagagccttctgagcgaacagcaatgtggatctcatgtcatctccttccaaactgaaattggcttttcagaagttctaccttacatggtaatgctacctggctccgtttcatcttttactgatggagcaattaagactagcccagactactgtgtcacaggacagtgtggcctgctgaccagttatctcctggaatctcactgcaggagacactggctggtctcagggtctcagggtggctttggtccttcccgtgctctgttagaaggctcttgcctatgctaagcttgagttgttcttggaattttttttcttttaccactcttatcccttgaagcactacagagcacctcttgaggcttggagacaaacagacttgagtcactttttcagccaattatctgttttggctttatgaggctgaacagtggcttgcctcgtggtaaactcctgctcttcagacaatagaagggtggaggtgagaaactgtttgatgcacagtctgcactgcctacacgctggcattcatatgagataccagatggcacaaaggttacaagaaaggttattatgcctaagaaagtactttgtccatgtattcagccgtgagaagcactgatggtaatttcatttgctggaagtttccttatacacctggctttggggcagggggatctaatcactcattagtcttttataaaaacaaaagattaacttcattacatttgcgctctctctctctctctctctctctctctctctctctctctctctctctctctctcgtgtttgtgttcatatgccacagtgtactcatggaagaacaacatgaaagagttgtttatttcatgtcttgtgggccctgaggctcagacaggtcatcaggtccagcacagcctgagccatgtcacccacacacatcagtgatgtttgcaaccataagagcaggtagtatcctaagagttgtccttactgtgtcatgctcagatctgccacaggtccctgataccaatagttacaagtggtgaagcagaggtgtctgtccccaagagttttgatggggcgttggggcagagaaacagttgggtcccgtccacaaggtttcccataccacgactgccttgagacttgtgacctctcctatggtcagtcctttataggaaagacttactgattttggctgaaggtatacacaactctcctctttggctcccagaatagtgttcataatatgaccttacatttagttgctatgctcacatttattgactcttgtcattcttagggttgttcttagcagccaatgtacttaggttttagtttaaagctacgtcatcatctgcttcccccgactcaaggctgtctgctgaagcccagggaagagcctttggttttagttctgatgtatggtcatgttaaaaagattcatgcccaaagggagcatgggacttctgtgcagaagtctatgaattgagggaatattttacaaagctttagttagatccaaatagctaatggctgtgctctggaaagtaagtagacttgctaaattcagaatgataagtaagaaggaggtgttaccctctcccaccactgtaaacgccgaagcaggactatgtactccacatggcaaatgctgtcaaaacatgaaggagtagctgagtttgctttcaaagagctagaactactccctctatgggaggagcatgggccgggcattcgagggtggacagcatttctcttgggtaaagggtttttaggtgaagaatgaccggcgtgttggcatgccagcagggcttggcatgtctggagattggaagtgatatggtctgcttggaggagggtaaagagcccagtacgtggctgccaagggagtggagaggaggtgacagaatgctcgtgcatctggaaaggtagtttggggccacaggatacagagataagcatgatggaactgtctgtctgagtattttaggtgtgttaagacttcactgtttgttggaggttaagggggggggatagttaaaaatggaagtgggcttgttctattttatcatattctcattggaatgacctctgaagatgtgtgtactgcttatgcttgttcaatgaaagttagttttagtgcagtcataatgcctcacctctatttatcattttgcatttaggaaaactcagcactttcagcatgtatggtcatattgaactatggctagtgccttctaaggcaatctcagggggtcataggtacaaggaagctatgggtttttcctcaagtaacatggttttgaccaataggaattgcccccaagacacagcagtcctgtatagaaacctttcgtcccattggcggagagactgggacgattgtcactgaggggcttgtcgatgccacgtgagctacagcagaaagccttgagtcaggggtacagagtggcaatggtcttacccagtgggagtcatagaaggcgcttccttccaaacacgcctggctactgcagaggagtgccaactttgaacatcaaagagagccaggtctctgccagccacagttggtagagtcttgcctcaaaccttattggatatgagggaattgatttatgtgtgatggtgtcatggtgcccacagcagatctgtagtgggacccaaccagcatcctcttaaaactcatttctgaaaggccctcccacgtggcacaattcagattcctacacagcccaggggtcactgtacaagatccgtttatgcatgaatttttttaagtccctttaacctcacaagatactcttgattgaagcctggagacatatagtcacctctgtgttgaccctctttattatactagattcataaaatgcttttaggattccatctgaacaagacagatatttagaatgctgaacatgccattgaagttcatgggtctgtctcgcctctccctctctgtgactgcatgggcaggaatacatagatactgaagatatgtagatacttaaacaatgttttgatgtcctttgaaggaatagctgctggaaccagaggccccatacaccccagagaaatggatgtgggaacagactctgtgtgtaattatagccggtctgtagaaaaggcacatttagttctaagaactcccaactgccttccaaaattaatatgtcatatacagttgtttctttttttcaaagaaagaatagggttcaggtttcttatatttgtttttttgaatgtgtatttatgtgtgtggtgtccgtgcatgtgtgatgtgtgagtgcacgtgaatgcatgtatgcatgtgcacatgagtagaagtgtgtgtggaagtcagaagtacacgtttgctgtcttcttaattgctctctacgctgctgattgaggcagggtctcttatggaacctggagtgtgctggtctaactgtccagtttgccccgagctttccttgcctctgtgtcacaagttcacttggtgcttttgtgtgagctctgaggatccaaactccagtccttgtgtttgcgtagtcaatactttatctacagagccacctcttgagccccaactggagtctatgttggcctgcgtcaattgcctgccatatgttaattgagctcttgatggacaggaagtcacagttgtcctgtatccagagggacattcagtgagcacagtaaatgtcaggacaatgatggattgttttgagcatcaaaaagtgatttttgtccctgagtctgatgatcattttggtatccgtactattttgcctattgctgtagctgcctgggggccatcaggaacaaaagagcaagcccatccaaagacatctccatactacggtgggggggcaccctctcagaggaggagaggggggatagagagagggagagggtctctgaaatgggaccaggagtggggcagctttgatgtaaataaaataatattaaaaaaaagacaccttcatcacaaagacatctccattcccggtgaatcacagggaccccggcatatgctctctcttactttcctgccttcctttcctctctctcttttcttcttctcttccctcttccttcttctttttgcctcatttcctcctccagggcattcccaaagcgctgtacagggaagatcattgtttactgtcaactgctggccactgatcactgaacataagtcatcctccatcatgatccctttgggttctgtcaccctcaggcctctgtgcacttaccggaagatgcttctgcacttggcactgaacagagttgttcacagtaacagccaagagaagaaatcctttcaaggctgcttgaaaggcagcttgtgtgttgaaacgtttttctatctcttcaagctggactatgatgagggtttcagaattggcctcgtacatttagcgtgcttgccgtaggggatggtgtgactccactggctgctttgtatttcacaagggaagctggacttcaactctggaattgtcttagtcattgttctattactgagaagagactatgactaaggtaaggtaactcttatgaaagaaagcatttaatcaggggctggtttacagtttcagcagcttagtacattatcatcatggtggggagcctgaagggaggtgtcagtgctggtgcagtagctgagagctctgtcctaatttgacagctaggggtgagggaggaagcggggaggggagacagagacagacagacagacagacagacagacagcctgggactggcatgggcttttgaaacctcaagtccaacccccagtaacatacttcctccaacaaggccacacctcctaatccttctaatccttccaatcaaagagttccaccccctggtgaccaagcaatcaagtatatgagcctatgagggctgtggtgtttagagcaccacagagatccaaagggaatctttctcatatgttagtctttacaagggtctaataagaccatcatatgagacgaagtgggcatcttctatgatataactcctatcctccgacacaatgagagatcccactgacttcagggtgtaagtgaagaagcagagctccccttggtgtaaatcccccacctccgtacccttgtaaactttactcaggtttgcttgcatgtatggacactccgctgtggtgctccagactctgattacatcctaacacgttggtaaaataacgttggtttgtcttctgccaagctctttttaaaagatgatctagtaaataatgcgaggctaaggcttggtttgtgtgtcaacttgatctaagaatcatcagacaggaaaaagcctctgttgaggaaatgtgtccaagatcagctgtaaggcattttctcagttagtgatcagtgggggaggccagcccaggctgccattcctagactggtggtcctgggttctataagaaagttggctgagcaagccgtgttaagtagaccagtaggagacattcctcagtggcctctgcatcagctctggcccccaggagcctggcctgttggagtccttcctgactttcttcaataatgaacaacaatatggaagccaaataaaccctcttctccccaactggatttttggtcaaggtgtttcatggcagcattagaaaccctagctaagagagatacataggaaagcagtcggcgtcacgactaaatggtcatttatgctattccatttacccagcagcctgtgcgggaccagggctgccaggggtgtctgaagcccactgagttttgacctcagtcacaaagttttctccaagcttcctaatacaagcagagataactctcaagcttgcccccaaaaggaaactcattatctcttaagaatactctttccattcttaaaatcacagtgccatctaagttttctgacctctcaaataaactggaaactagctggattaacccgctcgactctctgggtattgtgttttactcagtctcctttcccagtcttcctcagagtggattgaaatgtggacattctatggcctctgtacacaaaaataatggcaccgcagctcagcagtagggtcactctgtaggattgctctcaccgagttcaattgttaaagcagcatgttaaacgttggaaagggctgcttctgcagtgaagactcaactaaagactcctttagttttttgtttttcctcttataaatggtggcccaaccttgaagcacagagagccgcctgacgcccaaatgaacaggattcttaaaataagcatcgcaccctggccgtgctccagagttcctgcgtggtacggttcttctggattcctgtaattcctatatgctcccatatcttaattgcccatagctgtgtcgccagtacaaacaggataagggacgcgtgcacaccctgtgcaagtacccaacagccctaagaaagggctccatcctggaaacctctagtgttttctgtaaggttccaagtggttatctacggaaatgccaatggagatattgaggaacttagcgatccttccaagcaggtcagacacctcactatctttacagtccagatggagagctaccatttagcataaagaaaactctgagctagcattcagcctttgaaggatatgcgtttggaagccagtctcggagagctggctagtgcaggttgggaatgctggcataatgcggctcccagaactttcctactgtctgttttcagtaggggcacagctggcctgatgacctactttgaagccactggttaaatcagaagccccatcataatgacaggcgacagccttgttccagactcggcggctccgtgtggaattgagtagttcagtgcacggagcctggaggagtgagtttagcgagcactggggtctgtatctacttcaacacatgttctacacgttgtttcttatctgtgaacttaggttatcaatttaggttacctgtctcctgaaacatcatttaacaaactgatacacaggtctgctgtgccagccttcaaattcctctcggtgagttctactccaaaatcagcttcagcaagttaaacacacagggaatagtgataaatgatgaactctgtatacacagacgcctcagggcatcagtgcaggatggcggtgtcttggccaggtgtggtgccccacctttaattccagcccttgtgaagttggcagaactctctctgctttccctgccagcctgatctacatagcaagttccagactagcctgggctacttagtgagatcctccctccaaaaaagttgggggagggcagggactataaatttgttcccacagaaatgcatagaattatagtgtgggtacaaaagtaaaaataaaatatccacaatatgaggtgtaggtgggttttttgggttttgttttttgttttgttttttttaaagtgcaagttcagagcaggcaatggattcctgttgtgcctctatgattacatttaggcttaaagggctagttttcatattggggcaaagagaacgaggaaaagtgaatatgaaagaacaagaaaaggagaatatgagaaacagcaaaaggaatagaaattatttgcatagaagtgagatgaggaggagaagagatgagaagtggcctcgaaatttttcatcagtactgaggggactgactcggaagcccttctcttagggagcagacctgggtctcccctgaagccccgcacttggcccctgacagagatcatttgtctatcaggagctctcagaggctgctgggctgaatctgaggtctgacagtcagaggggtcagatggcactgaccctgtacacacctgaggggtacaagcagcccctccacacaggctcacaccaccccgaagggctgcagagagtgagcgtcgcggcttttttgtttgtttgtttttggtttttttttttgggggggggtgtacagagtttctctgtgtagctctggctgtcctggaactcactttgtcgaccaggctggtttcgaacccagaaatctgcctgcctctgcctcccgagtgctgggattaaaggcgtgtgccaccacgcccggcgcgtcgaggcttttgctttacttccttcagactggttcatcaggatcgtcaattccctctcatgctccttctctgccaagccatggatttaagatgctcccactaacatctcatgccactgggctcagatggcacacagcttgcaattctagcagggtgtatcctgccacttattaacgtcagctttaaggcagagcagtgcatcagcacagtgcctcaaagtaattaagtgactgcctttcaaaaaggaaaataaaaagccctaagcaagaagcgtgcagaaaacaggaagaacccatactgtcgacgtgatacaaactaggatcatcgggaaagagggaacctcaacagagaaaatgccatctgattggcctgtgggcacttttttgtgattaatgatttaagtggaagggaatagctcatgaggccagtgccatccctgggcagctgatcctgggaggtgtaagaaagatagcttagctgaataagaagctgggaaacaagccagtaagcagctctcttccatgtgtctgcttgaattcctgccttgagttccctcgctgacttctgttcacccgggagggagctgtaagtggaaataaactctctcctctttaagtttggctgtggtgttttgtcacagcaatggagagtgaactagcaccctagctgttggttaattttatttctttgcttgcttgcttttaagatttgggcaatgttttcatgttgataaggagctgctctgcccaaagtgtgcacggagatcacaacagagctgcaggagggggcattgccctagcagagagaatgccagggcttgtctctatgttgtttgcagcacagggaaagtgagattgtcccacgaagagcgaggatatcaagggttgtgtctttgaactcatgctttgccaacgtttggtgaaattgtagaaaaatcttaatccctcaggttcttcatctgtaaagagaaaggaaaaaaaaatatggttcttattaaggggttcaggatgacttttaaattgctccagtgaaatttactaaagctatcaacgcatgttggtgtctttcttttgggcttgtttggagtgattgctgttctctgcagtagttgtatgaattatgatgttgtggggtcgtaccctctttagctgcactggtggttccaaaaggtgactggatgtcagagaacaaaatgcacagctgctttggtatgtatgtatgtatgtatgtatgtatgtatgtatgtatgtatgtatatgtgtgtgtatatatgtatgtatctatgtatgcatgtatatgttttgtctgaatgcatgtgtgtatactgtatgcatgcaaagccagagagaccagaagagggtaccagatccctggtaactggagttgcactaagctgtgagcctccacgtgggggctggggattgaactcaggtcctctgcagaaacagccagccctggtcacccttgagtgctcctaaaatcatagtttaaatggaagaaagaaaggagtgaaagagaatggagtagaagagacaggagaaagggagagggaggaagttgaaagagatgaaggaaaggagggaagaagaaaggaagggagatgtggacaaaggaggaaatgagggaggaagaaaaagagagatgtacatgttataaacaaagatattgtaccctgtagaactgatgccaaacatcagatctcagtgctgaaccgagcatcgatagtctatgcatggagtcttaccactgggaggctgaggcagaaggatcatgtgtacaaagccagcctgtgctacattgctagatcctatcgtagaaacaagcaagcaaccgggacaggagcctgatatagctgtcttctgagaggctctgccagatcctgacgaattcagaggtggatgctctcagccaaccattggagtgagtgtggggtccccaatggaggagttggagaagggactgaaggagctgagggggtttgcagccccatggggggagcaagagtgtaaaccagcaagaccccctggagctcccccaggactggtccaccaaccaaagaatacacatggagggaccgatggctccggcagcatatgtggcagaggatggccttgttggacatcagtgggaggagtggcccttgggcctgagagtctttgccccagtgtaggggaatgccagggcattaagacgggagtgggtgggtaagtggagagcaccctcatagagggtggggaaggggtagggggtttcagaaggggagacctaggaaggggaaaacatttgaaatgtaagtaaggaaactatccaattaaaaaaagtacaaaaacaaaacaaaataaaacaaaaaaccaaaaacaaagaaacaagcgagcaaacgaaaccatagcttctctccagagctatggtggcttgtccatggaagaccattgaggtcattgactagctctttaaatgtgggtccagccatactctttccttgattccctttcctgtattgcttctaagctagccagtagcctttgcagacacagttggcctgctttccggtatccagagcttttactgtgaagccccaaacctccccagccagcctagaggtggctgagaaacctggaacagtaagagaaatgggtgtctccaaagaggaggggttttatgggggcaatggaaactttgggatagaaagtagaaactccatgtctgtcacagttcaagaaaaccaaacatcacgagccagcgccactgttatttcacttttttcatttttttttcccgccatgtaagaaggggcccaaacagtcctgctgacagtatagcagggtctcaaatagcagcttaatgaaggccaagtcacacaagctgatgctggcacaattaggctccccactgccagcggcaggcatgtcaagtctgacaccgtcctcctctcggagactctgctgtaaattgcagctgctgtggtgccttgttatatttaataggtgggatggccggagagaaaaatcagaaaccacggccgatgtgctgtttatttctcagtcattttgtgttaaattgctgcgacttcaatgtcagcggtgtcaggatgtggtagtgaaactaaatctatggccagtgtgccaagacaaatttcagaaaaccccaaaacacaattgtcttggtttcttgctggctgcacctatgcacacacaaataggactgatttattgccctccaactgatgggtgcgttgattgtcttgttgcatttggggtggggtggggggtgtctactttcctgcacactgaggatgtcaggaatgagggaccgttacactcactaagcatgtcacatgtccatactaatcactgctaagcttcagggtggtggagtctgtcttggaaagggaaacaaagagtcccttctgctggaaggttccagcagagttatatgtagatgctaatagggttaagggagtaggtacggaggaagtcggaaagattgcagacaatactggagttagcaacatccctcttactggagatggtcacagggtgcagccccagctcccccacccaaccagggagcagtctattagggagtgaagatgtagctcctcccatcaaactttctcaaggtgacctttattaatgaaggggacctagcttccttctttgtgttcttgtcgcagtagcccatcaaatgccatcgttgacacttctgcccgggtggcattcacgcagcccacattgtgagtctcttttcacaggaggcagagagtgtagaagcaacgtacttttgactgcaagtacctcctccccttgatgccagctaaaagttatttccgtttgcctacactgcgtttcttcatctcggaagtagtgtggtttctctgcagcgcatgcagtatgagcagagcggtcctttcttttatgggagggcagggtggggtaggcacactttattcatccctagctaattcacgaattgaggaactggaaatggaaggctggccaaagtcatttggtcccacgatcagagtctatggtcgaagttctcaaaaatggcagtgcaaagaattacccgccatccaaccagtcatctaggatgctgataaagccctcaggttgagtgcccattcttaaacagtgggattcagaggtcaaaagcaatggaggccattaaaatgagaatagcatgaagacctaccacgtttgcttacaccagatgtctgcaaggacgtgaattcttctgcctgtgctggagtttcttatcttggaagacaggtggatacttgtactcatgtgatatgtgcaatgtctgatgtactcatgtgatatgtgcaatgtctgatcaaaagcctagatgttcctttgtgctttggagtttatttgtggctttttttccccctgtcctttatttcagtgattctcaaaatctaaggtactcaagagtctcctaggaaatgtagcaaatgtagactattctcattctttgagtgctagcggtagtgagaagacagagagctcagccctgtgctcctaggctgtgctccccacttaggaatctctgttcagacagagcagatccttgccaacactgcagaaaagaatctgaagaccagtcaacatttatcgccgtacatacgtttattaagacaagataaggggtggtacatgcctcaggtttaagggtgaatgtttccagagagggagacttaaggaaaggactgtatacaaccaaggtattacatgctggcccctcaggagcctcgctttcagttgtttccacaatgactgaatctagaattccatgctttaagtcatgtcataatttccaacaaaatgtaaagattacgtggtttaaaaattagctaaaaatatatgagctggtttatgtatttatcttatctcaaagaattttctttggcagatggaactgtaaactagttttatgaggtgtatggttaggtttaatgggaggggaatgtttgacagttaagctagaggctacaaacattctagcctaaagaagagattgtttttaacatctttttaagagatgcctttgcaggcaagttcaattttctcattgtgcagaagtctttcaattcccaaccaagaggaaaaaaaagtagatcccaggggaggggtgttcccttcctgtgtgttcctaatttccccagcctcaggagtctgagctccactctttccagaagggccctccattggcttggaagcctcttacagctttgggggaggagtctagctggatttaaagtgcaggtaggttatgatgccctcagggagcagaacacacaaaacctccccagactactaccaagcccttgcaaacccacaccgtctatgtttcagtttgacctgctgacctttcttgctcatcatggaaattccccaaggacaaagaacactggtgggttctacttagatgactgctgctgttgggcaccaagagtttctcctgatctccagtgatcttgtgtaacagcactggcttgaccagccagggatcagtcagtgtgccagcaggttgagccagtaggttgagccagcaggttgaatcatgggggaagggaggatatctcagagctggtgcataatgtgcccctctccagtggtgggtattttatctcaggtttccaagttcacaaggctgtggacccagaacagcactttgagaaccagtatttagcaaatacagcaaatatctgtagatttttgacccaagaattcaacaggccacctgtctttttcttgtcaattttgtgatgtaaccaactgagtggaggaataaaccctagagcgctaagagcagagctctggacatcctagcacatgtcttacagattctgtttcttcgttctttgtcagaacacatatgtaagacctttcttcaactttgtttctttgttttatttgtttgtttgtctttttttcccagacagggtagtcctggctgtcctagaattcactctgtagaccaggctgacttcaaatgtagagattcacctgcctcagcctcctgagtgctgggactaaaggcatgcgctaccactgccggactttgtttctttgttgttgttgtttgttgtttgttttgttttgccttcctatatatccctagtcagcttagaacagctgatgtctagtctaggctggcttcctacccatgacagtcttcctacctcagcctccaaaacattgagattatgagtgtgtgctgctatacctgaccaccccccccccctttttgagacctctttgagcattatggggtaggggtagcattgctccatgtagagacttttgatgggaaaatggaatcgtcttgtcaccctttagagtatccaggactttcagttaaacaagtggaagatggtgggaactgcaaaaactctggctactactctccctgccctccaccatacagaggacaggaattagagcacacagagccctttatttggtaccctgggacatgcagctggttttgttccttctctttgcctctaatgaattctgtcaggcagcaagagagcttccctcctgggcacattcacaaagacccagtggccacttggcagctttgcaagggacctgaggagagatttgtgcaggatccagggctccaacttcccttctgttttctcatgtggtcacgacagcaccattcaatattgacttgcctgggtacatagagaagagacaggctctgaaaagctagatggcgctcctggtggattcagccaacgagttggtattcgagctgagatccccactgagactttcctgccctgagtgagatcttcacggtctgtgtgaatgtagcagggcctttcttcaaagagaaaccatgggggtctcctgctcagtcagaaaaagagggcctgtagaaaattctagaacagctggggatatagctcagttgtagagcaattgcatggcatacacaaggccctggattacttcctagtaccatcaggaaggaagcaccagtgaagaagaaaggaaggaaggaaggaagggagggagggagggagggatggagggagggaaaaaaaagaaggaagaaaggtcggtcatagtgtgtacaacttttggctttgtttcatagtttctttctctgtctctgtctctgtttttctctctgccttcccaccctcagtttctgtctctctgtctctctgtctgcccttggcctctgactatgttggctctgctcccttgtgatggtgctaggtgttatttcactgagagattctcacaggcactggttaactcaaaatgttcagcctacctgttgctagggctcctctgaccctagctgcctgtgctatttccaagcaggcatattcttccccataagtctgttgctgtatcccaagatattctaagttccacagtggcttatgcttggtaagtaaagtgggctagggatccccagtggatgttttcctgaatgcaccatgacactgccatcaagggaccgggcagttgccaccacaaaatgacttgagtggtgtgcctgaccccagctcttctaagtatagaggacaatagtgatcaccatgtgatccaagaaccttgtgtgaggctaggaccagcagagagcaaagggcagaagcagcaaatcctggcaggatagatcagtacaagggctgaggttccaagctcacacccattgtcctataggacttcacatcaaagaaatgaattaaaacgttatcaaatatttcaaaatgataccacagggcattcaactcagagtaagggcctgaatatgaggaccccacacctgctctggtcacaaggccaagaagtcagctgtggtctatgcagaagtaaagaactgtaaataaaagacacctgagcccaaggtgcttttagagagagaatgcagtatatctaataaattacttatttggaacagactcaagtcagtatgttatgtttatgaagtcatacgtgattaaatgctgcatttagctttctgtataccgataccttgcaaattattgaggagttaaatccctgtgcccccagctctccaattccccaaattcgatttagcaaaactatgtagccagagcaggggaggggcagacgaccactcgacccctgacacaggaatctccagtgcacaggcttttctctgagtgcaaggcatgggaatgaatgcattgggggaagtaacagagtcagtggctggtgggaaagccaaagggttggagggaaatcagtttgcttgagttgaaaaagtgggtcagaaacagagagggaggagtgggccaggctgtgcatgtggttaaactggcgccggtcaagtgggagtacctggccacctggccagaaggagaagggaagctgggattggaattacagaggattatagcaagaacccatcccagaggggaaagggagttcttggaggaagcagaggaaacagctcattcctaagtgggtggatctgagctgcacaagccattaaacccctaccctgctgctctggtggcggcctgagctgagggagccggcttgccatgttctggttctggctggaggtaacctagcccgtttcgtttagagcaattttcagcaataccctccacccccaaatgagaggacatttggcaagttgctcaagcccctcatccaggtcaggggtcttgcgatctgtaagcaggtgacagctcttgggtcagcagcttttattggcttgtcacatcctcctccaggcctggttgtttcacctggctccaaaacctgaccagagacattggtcgggcctgctcggacatcctgccacctcacacattaactggaacctaaatgcagattaatattatcagtcgtttatcagtcggctgaaatataagctgtctaaatggttctgcgaagcagcagagacaactgtgtgcctggggtggagggagcacagaagagggaccacatttagccgtcaagccactcttgtaaatatttgccaatgccccttcagtgctcaaaagcctgggacaggatcatttggggatttgcttagaagaagtagaaacaaaattgacctcatggttccaggcagccataaaaaaaggaaactgtgtgcgtatgggcagaagaccagaaagggggaaaaattgttcaaagtttaataaacacaaaagagaataaaaataaatctgcaaagcacttatttacaaacttgataaaggagaagattatggtggaagggtgtgaaagacggctgtttgtagaagtcgaaattgttccggaggggctccacggaaagaaaaagaggaaaaggaggagatgtttactctggctaatggcaggaaacacacaaaacgggtcttgctcttccaggaggtgctttcaaaggatgtttgaagcctctgctgtctaactcagaggataagcgaagatgaatgtggccatgattcctgtagatggttctggccaagagggcatgcaaagccagagtgcctggcctgagctctgcctgcccggcgtgctgtgccaggacaaccgacctgttttcagctgcgctgcttagcacaggaacaggagtcatgactcctgggatgggtatattccaagcagagaaaagccagtgttgtctcggcagctgccttgtggaattgtgatgctcagaggctccaaggactcttcaggtggtctgaaggcttcacacaagtctgtcccaccgagagcagccagcacagcgtttcagtgaatcctttcttttctccaaaatttgcttattttagatgtggggggctgtttgtttgtttgtttgtttctgagagttctggtttttgagcccacgaaggctgaactcacaaggcaattgatttggaagtccatgagcctgcattcacagagtcttgaggatatggggagagataagaaagggcacctgttggactatccagagactaccccacccagggatccatcccataatcagccaccaaacccagacactattgcatatgccagcaagatttttgctgaagagacgatatagctgtcttgtatgatggtatgccagtgcctggcaaatacagaagtggatgctcacagtcatctataagatggaacacagggcccccaatggagaagctagagaaagtacccaaggagctgaaggagtctgcaaccctataggtggaacaacaacatgaactaaccagtaccccccagagcttgtgtctctagttgcataagtagcagaagatggcctagtcgaccatcactgggaagagaggccccttggtattgcaaactttatatgcctcagtacagaggaatgccagggccaagaagcaggagtggatgggtaggggagcagagcagagggagggtatagggaacttttgggatagcatttgaaatgtatataaagaaagtatcttaaaaaaaaaaaaaaaagggcacccgtgctgcaaagcctgcagagctcctataggtgaggaaatctgctttgtatctcacactccagtaacattgtcaaggcatggatttcccaggaaatcatgagggctatttatatctgatcagcaagatgactcgtttaataagttagtattgccaataaccagatatctgactcgttcgagacactcattgatgatcaactatgcaaacaagaaatctttggtgaaatccctacattcagaatcctgccctgtggggaagaggaagaaattccttgcaagtagtctctattttccagatttaaaaaattttttacaggaaaaaacaaaatgaaaaacaaacaaacaaacaaacaatgcagaaacagtcaaagtgtttaaagagaaacataactggggacgatcatgttgtaatgaggtcatatgagtgtaagcacaagaagtagagtgtccagatcagctagaacattctagaatggggaaggtatattcacaggtgagaattgggtgattatagaaacatacttaaaagccagtgttctgttggcccagtgttggtgttcaataaatgttggaagtgaagtcaaagagagggcagcctgcttggttcttagggtaatgtcatgcccatattcagaggcaagaacagttactgaaaaattacagattctaaccaatgcatggtcttgaacttgtcatgtaacatcacatgtgttgtcttccatgagactccaaagtaaagggactggtgctttattctccccatttcatagctaggatcaccttttacctacagatgaagttgccttcccctaagaatttgaaggctggcccaggtgtgggcagtttgtgggtctgctcttgttttattcagattttcttgtcatgacttggtcatgtgtgtgaatacccggactttaaaagaaaaagaaaggaagaaaggaagaaaggaaggaaggaaggaaggaaggaaggaaggaagaaaggaagaaagagaagaaagaaagaaagaaagaaagaaagaaagaaagaaagaaagaaagaaagaaagaaagaaaggacggacctggtccatgagcctgaataggagtagggtagctgggtgccaaactttcaaggaaaagccacatggggagaaagaaaccttgccatttagcagctattttcttggcatatctgattaaagtgtatgcaagcccagcagctctctccagccatcaactgtcatgaacttgttccaattcgtaaccatctggggttttccactggtctgtcagccttcaaaagactgggttaactgcttgcattcagacgtggtggttggaaatgggttgttaatcgttcttaatctgcttctcctggaaccaaacacacatgttgattttagtttgttcctggttaaattgctaatggtattaaattggtcattggaaaccaaactctgtagccatttccctttatggctccttgggattatctcacagtgtggtcttaagagcatgatggattgaatctttctcaacggtggttgtgctaactttttacagatgccatcccgcccactttctacagaccctacttcagaatcgtccgctttgatgtctcaacaatggagaaaaatgcttcgaatctggtgaaggcagagttcagggtcttccgcttgcaaaaccccaaagccagagtggccgagcagcggattgaactgtatcaggtaacctgtgctctggttgtgggagtgcgtgagacactttctcctcctgggattttcttccatacgcttccgtgatgtgacgctttgttgttactctcaccgaaacggctgctccctcttcactcggcaaggcagagacatagaacggagcaccaacactgcacaccctggagaactcaggagactactgcacgggtcaggcctgtggcctagaaagccagattacacggaccaccctaggcagagaagctgagtggggtctcccttctcctttactcgcctctccttttcctcatctcttttctctcacctcatttcctgtttcctactacctgtcttgtctctgcttcccattttttttccctctcccacagccaatccctaatgtactggcctctagcctacatgtgcagattctgttctacgctgggccagttgccctgacatctcctgatatctcatcttgtcagtagagctgctaggtgctgtttaaaatagatgtgaagagtggggtccctgagatttcagatatagactctgaatcaagggtctcaggggaagtttgtgggtctgaggtttgaatcataggatctatgtgaaatgcagatactccttttctacatcttctgttttaaagaggtcccccgttggcgtactacactagtttattgtgttcttatatctctacctcccttccaactcttattccttcctaatccctcccaacaccccaacactaggaaggagagaaagaaggttagaagggaaggagggtatagacctcattaggctacttccagctgattaaggacataaagttccttagggcaaggccagtctttgtcggcagaatatctagcaaaccagcaaaccagcaatagcaaatgtagcaatagggaccagcagcatggtgggggagcggggataaggataggggtggggatggggaatgggggtaggggtgggagatgggggtaggggtgggggatgggagcagcagtgggaaactgcagctgtccctccttcttgggtctcttccctttataccctctcccctccagaatccccagaattaaactatgtgcagctggcaaaaatcacagccctgctagtgcatgaggcaaatcacaatcacctgctgtgaagcagcctagtatcctatatctgggattaaaacaagaacataaaactcacataactgagttttctaagaatttcaccactgtcttcaggtaatctgtgtgtaccatgaagctgttcttcaaaaccctacatctggtgaggaaggcagatgtacaaaccccgagcttaaatgttatcatgtcaagggaacagcatttgcatgtgtagaaagcagagactgggagctctcaaggcattagtgctcaaataaggctttcaaaaacatcttaaagtatattaaaacaaggtgaagggtcattctgagcagaaacagcagtgtggtgacaggcattccaatatgttgtacttatttatttatttatttatttatttatttatttatttatgcagtgttgggaatcaggctgagtgctttgtgtatgtggggcaagcactctaccactgagctaaaccataagctcccaacatctgagtctttgtggacttattgtatgtacccaggataaagtgttccatgcctggaagtaagaaaaaaataggagaaggtggccttcaggcagagtataacagagagaggcttaaagagactaagaacagatccctggttcaggcagtgtggttcacagataggcttatttgaagaaaaaaaaatgcaattgacatttatatgtagaaatgtcattgttctgggttttaattatttgaaaagttgaataatcaagattagggttttcctcattcattatgaaaatgggaaattacagtgtacctgctatctgtgagttcatgagaatatatgaataactattaaatagaagttacttgtggagtatacatttccttgtccatcattcatttggattatgagttgttagttaagaacataaatgagaagcatggaattagacaagggggagcatggaagatgccccagcaacaatgatgtccctttggacttgagatttttaccagtataatggagtgatgctggccagaaaacccagccatggaagtaaggtctgcagaggaccatttccttgataccaacccctataaagtccactcttattctatccctttcactcccgagctgtcctctagaggatgtctgcttctgatccctttattggaagctccatttttctttgccgtttgtttgtcagcttatcactggagtggagatggtggtactgtttttggagctgttggtcatgtgtgtgtgtgtgtgtgtgtgtgtgtgtgtgtgtgtgcgcgtgcaccactgtgaacttagcacgagagtgttcctctccagtgtaatccattagaaccttagcaggggggctggagagatggctcagtggttaagaaccctgactgctcttctgaaggtcctgagttcaaatcccagtaaccacatggaggctcacaaccatttctaatgagatctgatgccctcttctggagtgtctgaagacaactacagtgtaaataaatcttttttttttttttttaaagaatcttaacaggaggaaatcaaagctggcctcttagctcccactctctgcaacttccgtctttccccattacacctggtctctacagggtccagctgaagggaagcagacacagtgccatgatacaacagctcacgaaacagcagcacaaccatagatcttctctgtccatttcatattttagtttgagctgcaaaagtattaaatatttagacttaaagatgaagtggagaattgatgtttgtggagcaaaataattaaactattttgggagggagaacaaatcatcactcacagaagcagatggcctacatagttcaactgggcaggaatctgaaatgtgcatctgaggctttagagtgtaaggatgacagtggatgggatggaccttcacttggagagatctgagttccttaggtgtgaaaggatgggtgcctagcaactgtgggggagacagtgctaatgggagttaatgaaaactgccactctctcctccacctacaccaagtgtgtgtgtgtgtgtgtgtgtgtgtgtgtgtgtatgtatgtgtgtatgtatgtgtgtgtgtgaaagagagaggcggggagagaactctcagctttcatttctcatattgcccaagaggatataaaatagaaaaaggtcagccagaaaacctgactgtctgttaaattagacttgcaaagtatgctactgaaaaaaaaaagttatactgtgctcctgttgtatggaattttacaacacacaatccccttaagactgatcttacctctggcgccacatcggagacatacacagcatagtaaccatttcaaccacccaccaaaacaaataaacaaacaaaaaaaccatgatgcattaaaaaacactctttacacaaggccattgatatctcagggtcttaagagtgatcaaatgacctgcctgcctcataaggaggttcaattattagcatttccattaagtcatgatgctaccctgagtcgactagccttgtgagcagatgggacccagaaagtcacacagacagcagtccttcttgtctacactaaaaaaaaaaaaaatcaatagtaactaatagtgctagtattcctgtttttataatataacccaggaacaatagaacaatgttgacagttattactaactcatacaatatgtactatgcactgtgtgatgctgtaagggctctctctctctctctctctctctctctctctctctctctctctttgtgtgtgtgtgtgtgtgtgtgtgtgtgaaaagagacattcaccctttataaaaaccctacaaggtaggtactgccatcccctgtatgttataaacaaggataccagagcctgatgaacttcagtgactttgttggccactggactagaggagagctatgtctggattccaatccaggctgtctggctctgggagccatattcttgacctcttcaccatatctgcagaaagcacacggcggtggtgttggaaccatgtgtgttgaaggtatagctttggccctttgcaagtcggtgtgatccaaatacaagcacattgcttgtcagagatgtgtcaggtgcagagttcattcgtggaaacttcctgggcaggctctgtctccagcaattaccactgtaatttcccaagcactcttttgaacttttgtaggacaatatctctaatttacagtctggctcccaaatgttataaacaaaccttgagctctgcagtccctatcacacagggtctgattcctgcctgctcccccatgagctgcctcagggcttacttagagaacatttcccacaccctctgagcacgagcatgagccctttgcagtagaggagaaaaggaacttggtaaccagccatccctgggcttgcttttgatctctaccttttttctgtattggctttttggcccagcaaatgtctctcctctctcagcctctacatcataaactggagcgaaaggttttcttgaatgggtctctgaggcaatgtgccttccaagagttgcatatcaaaagcagaggtggactagtacctggatctactggtcacctagaggaagtacttcttctacaactggcttgtggttaggaaatgacttacagcgctgtctgttccctctggttggacttggtctgacctggttcctgctatgaatagagcagagcagagtgcttaatgccagtttagggcttgtgtgcttgcttgcttagctctctaaggatagtgagtgggcaaggggccgtgatgtgtctttcgtgtcctttggagaattactgtaaagcagttaagtcaatggggacaaccctttactttgctccccgtcccttactagtatttcctggtccagtatcaaaaattttgctattatgaattgatttttaatttttaaattcttgtgtatatggtgccgcacgtgcctcgtgcccactgaggccagacagggtgcatcagattccccaggactggcattacaaatgtttgtgaacctcccagtgtagaccctgggaatgggttccctggaagagaccctaaccacagagatatctctccaaccccctctgaactgactttcaataaggttctttttatcgtgcagcaaatgtctcatctctcaactcttctataacccccttgaggccaaagtctctcccaagggagaaaacatgcttattgtatgactctggcattttgataaagttcaaaatggcttttgataggacttttgttctagaagtaggcttagaacatagctcttaaggattcccctgcaaggacagatctagatatttaaaaggtagtctctcagttagggttctattgctgtgaagagacaatgaacaaggcaattccttttttttttttttttttttttttgagacagggtttctctgtgtagccctggctgtcctggaactcactctgtagacccaggctggcttcgaactcagaaatccacctgcctctgcctcccaagtgctgggattaaaggcgtgcgccaccaacgcctgactaaggcaactcttataaagtgagttggcttacagtttcggaggttcagtccattatcatcatagtgggaagcagagaagcaggcaggcagacatggcgctagaggaagagctgagagttcttcatctcgaccgcaaggcagtcaagagaagactatcccactgtagaaagaggccctccttcatcttgagtggaccttgagcactaggagtcctcaaagcccacacccacagagatatgtttcctccaacaagaccacacctattctaacaaggacacaccttctaatagtgtcactttctgtgtgccaaacattcaaacacatgaggctgtggggtgggggggtggtgtaaaatctatttcagccactacaggtggtattgatatatatatatattttaaactgctgtgctagtggagagtttagacaatgaggtgaatggttctggttttcagttagataggaagtcaggccccttcagcctgctgtgtccgtgctagtgtgaaaagtgctactttctggcttagactactgtatggttcccaaatgctggtccctggtctatcacatccactctctacacatttccctgctaaggcttgggtttactcttctgtctacccacaatgtacttctagaggtacccatgtgcctggcttccatctgtaacttgctggtaactttgtgccctaccctgtctgtcacttcagggtctactttccaatagagccacctctgccctcagtttttcttttctccttgatgatgctcttcatcatcatatgcctttggttgtgcacccagtccatcttcatgctgctttccccttgccccgatacccttgcctgcacaatagctgcttagtaggtgcttttgaatgaagtcaagaaaaaatttcacaagaacactgttaaaataagtgcctgacaccctaagtgcttctttaagaactgtcactcacttcattaactctgggaaacatactacattgatttttaaagatccctctccaaatattgatagagaaaggaatgtacttacctacccattttgtgttgtttattaagaagctgcaacctacataataacaatgtaagtttttaaaaactaagattctataacaagttaatgagattgatactcttgggtttaggcatggcttgtctcttaatgacacatgtattcaaggcatgactgccaatgggaggctgtagtcaaatggtagagcattgaagaagtgaggcatgatgggaaattagtgccttgaaggaagcaccttgacagtggttgattttcatgttgtggtaggaattaggtctagtgagactgagttgttctttctcccacagtggcttattatattgagggtccaaaggttacctcaatttcccctaaaaaggcagactctctgactttgtccaaaattgagtctaggctcaattgaagctggaccacatagagaaggatttctggtggttagataaaagctggcattcctcaggaatgtgaggaagggattgccatctaataaataagggatttcccttgcctctgcagaagggacatacggctctccactgacatatacctgtgatacctactagcacatccaagcctacactggcctccaggcccctcagtccctagtcatatgtacttacatacttaccaaagcactcaccttagtctcctggcccttcttacctcccctacctttctctattcatctctttcttgacattctctctctctctctctctctctctctctctctctctctctctctctctcaacattctttgctattctccctgcttctcaagccctggccaccatgtccagtctgttcctcattttctaggctctgcactcttccagatgtctctgtctctctcccatgataaaaaccttcccctccgtcatggaacagccatttcagtgttttctttactgtgtcccttgcatacaccatgaagcaaggctactctatgttggtctctctctgctttctcatgccactttggcacacactgtcaccatgctatgatataactcatgtgcccttactttcatccccctacactatgagccagacaatcctcttttctctacaaagtacagagcctcaggcattttgtcattatggcagggagcaaactaagacaactaagctctccatctttttaaaaaacaaacaaaaatatacctattattgacttgtttaagcttattactgtatagcccctctcactaatgaaaacactcagctgaatgtaaaggtatacacaaattataattcatgtgaattgtaggtactgcgaagtagaaaagaaggtattagaaatgtgttcttcaagcccatgtgtgttcatgtcagctcagagaattggaacaggaaatcagagaagaaaatcagaagaaagccctgggcagtcagtccacgggcctatctcagaatcagccccatctgtggaaagagacaactgcatcactggcacagtgcatagtcctagcctgggtggtatagccaccaaggaatgagggagtttagccagcaaaagggtaccatgtccttgaaccattgagtgctatgctgcatggtctctctcctgcactgacgtgattcagtctggtagaatcccttctcaagctgtgagagaggtcggcaatgacctcccatgttcctctgagtggcagcatgtagatttcaagtgacaaaggtctctttcatcccttagacctggagaagtgaatttacttgtttatgccatatgcagtcacagttggcacaaaggcccatctgtagagaaggaaggaaagaaagaaaggggaacaatagagaattgtaaggtgtttccatcacagagtgatgtggagtggggtgtgtgtgtgtgtgtgtgtgtgtgtgtgtgtttgtgtgtctatgtctgtgtgtgtgtgtgtgtgtgtgtatgtgtgtgtgtttgtgtgtctatgtctgtgtctatgtctgtgtgtgtctgtgctatgtatctgtgtgtgtgtgtgtgtgtgtgtatctgaacacatatatggtagcattagcataaaggtcattaaagattctgtgtgttcttcttgatcatggctgcacacatgattatgcataacataggtgtctatgaaggattaagctacatactgtaaagggaaaacactcacgagtgtttcaggctgactctgcaagctatccttgctaggcataaattacttgggacttcttggaaaggtacaattacaaaggagccatgacaattacaggacatggctttagcagaagtagtaagtactaggctggctaagccacctccgaggtaataatgtcagccttgatttgtgaggcacccctaacgtggccaagtatgacaaggaataaagttacagttctgcctctggaaaagaaaaaaatcatttcacctagctctgattctctagaacgttccactttctttcacttggcaattctcttttctgctccttgtgcctcctgctcctgttggtgtaatcctgtatccagttacagaccctaatgattccattctcagtatatgtgtaagctctgtggctgctatgtggatatgtataaagtcccagggagttttcatttgttactatcaaacactgatcgttcagggacttacctattgcttgaggcgtgcttctaggtttgttagtgataagaatttaccaggacagggctgtatgagatgccaggggaagattgtgtggagcaataaggaagtgatggagacaacattccttgccctgaaggatatttctgctaaggtcacacatcacaaacttccttcatggcatggcgtgtgagcactgtcaccagctaggttggttttccctctccaaaggtatattgaggtactaattcctaaaatatgatctcctttgcagttaagttcactgcagagataattagttaagatgggaccatactggaggaggacagccccatagtagtcgactggctgactaatgcccacaacaagaggaccccatgaactcagagatgcaccagaagagtgacatctcgtggcattttagctaatacataacttggttttgaaaacccacaggtttagagagtaagaggttgggtgtgcctgactccaaagctcttcacacttttcccggcactgatgatcttcaagggcattttgcatagatcagaggagtctcctgtgaacctcatgggccatggagtgggtggaataggcggtcctttcacccaggtgaatgagacgtctcacctaacaagccctccctgcagctctttcattgaaattccactttctctgctgtaggtagtgcatcataaagtgtgacttggagacaaccaaccaggatggaagtaactgcatcagtaatgggtcctggtttggtcgctgtgatgttagcttggacaccaacatgatgaagacattgaaaagcagtagcagatgtgatgtcaagacaaggatgatagatagagatgatagatagatagatagatagatagatagatagatatgtatgtttgtttcttgaaagggaaacatctgtattttcaatcaaaatacagatcacagaagtatagactacagcagtgaggtccagagtgctggcctgaagcctctggatcacttgggaatatggcacaaatacaggctcttagattcttatcctgtgaaactggaactgggctagtgatctgtggtcatgagccctgagatttttcctatgtgggcatcaatctttccctcctctttttgtatttctttcatctcatttcagaaaggatttggggtagaaaatcagacttaacaacaagctatgtataacaactaagatctattggagatagatagatagataaatagatagatagatagatagatagatagatagatagatagatagatagatagacagacagacagacagacagacagacagatagatagatagatagatagatagatagatttgctgggcatcatggtgtatgtctgtaatcccagacacacacacacacaaagagagagagtcagagacagaaacataaactattgacttcatggatgtggatgtggctactgcccaagaaagtaatttacatttaaagtgtgccccaaacaaggaaagtaaatgcccccccccagtccacattttgtatgccttccatagtctagaccacatatggactttattgaacaactaatctttagagagacatggaaaagacatctttacttggtagcacagatctaagtcacagctacccagtgggtgggggtgggctgcagaggtaggagggctataagttcagataaagcctggtccagaatgaattcagttatggcatgaacaattcagtgagaccctgtgttaaaattaaaaataagagggctgacaatgtagctcagtgataaagcacttgccttggatcagtgcccagtgctgggggtgggcataggggcattaccagaacagtgaaacactttgtattggacctgaagagaaccagctcttatgactgaagctgtcatggagaagaaagagaattccacattttgctagaacgagcaagaacaatattagaaaaccctcttccctaagtgtcttggctcttccttccaggcttcgccagtacatgtgagcagcacttcaggttttcccctctttggctatagggtgcagagattcagaaccatgctgtctgccccatggggtttttgttggactgaaaacaaacatgaaaatatttgaagagcccaattgcctgtgcagacacaaggcagcagaactagggtgaactgagcctacttgggtgaaatgatcagataaggtagaatataaagaatatgaaatgtctagaggtgacagacggagattctttcgtgaaaagtcaagaggagaggaggggcctttgcacaaaaagagagatgagagtgagctgggtcgggctacaggaaccagccactgctgagcctctccagtcttcagctttatagttccgaagttcatagcttggggtcaagcacatgcaagaggttcatggtgacagccaagagagcatacactggaatcagcattccttaatacactggaaatcctacttctatttaagcactcctagacattaatgacagttggaacactggaaacgttaaggccaatgtgagcaagattagccgacaccagttagcgctgctcaggattttctctatagccctgttggaaactctcccttttcccccagttctcctgcagggtcattaatgccaggatacggatggatagtgatgtccatttcccaaagctttcctgcaaggctgtggtatcttatggagggatgtcacacttggtactgagccaaatcccaagttgatttatagtattattcttttacggtgaagatttttctctggctgtaatttccaactagacttttacattttttttaacccccaaactatttggtaccacggtgactttcacctccagccactccccaactggctgctttccaggggtggagggataaatgaatgaatccttttgtgcagtggttttgtaactcgcgaaggacttaaaaccttgccaaaggtgagctgtgagtatcttgcacatgttgcatatgacttgtccatattggtaatgtaatgaaggtggccctgtgggtggcagctaagccagagaccctgtcctggcttctaattcatggaggaactactattggtgagctcttagagatcaagactatggaatggctctgtgggtaaaagtgcttgctaccaaacacaaagacccaagtttgatccttaagactcataatgatagaagacaagagtccgactgcgacaggttgtcctctgatctctacatgttcactgtgtcactcatgtgtgtgcgcacacacacatgcacacacatacacacacactctcacacacacacacacacacacacacacacacaccacacagggttataaaaatgagacaaactttaaattaccttaacttgattatatatgtgtgcatgtatatattctcacacacattagcatgttgtggccgtgttttccaagaatttttaagaattgaagaatttctttaacacagctattatatatgtgtgtgtgtgtgtgcgtgtgcgtgtgcgtgtgcgtgtgtgtgtgtgtgtgttatatttttctaaggatcctatcagactttgtcatctttaatcctgactttttactttctttgaaatagagaagattcaagaaaatcactgagaactaaagggcaggatctttctaggtttttagtattgttttgttttggtatttattttatagctttctctctctcatgtaaaattaggaaaaaaatactgtggtaaaatatatacaaagaataaaatgcatctttcagctgtgtctgctcgctgccaggggcatcgtgttctcagtgctctgtggttaacatcgttgcccactgccagtattttaagacacccctctctttgaaagaattgaagtaactgtatgtgcatgtgtggttgtgtgagtatgcaatgatgcttcaattgggatcagaggacaacttggaggggtcagcgctccaacgacataggtatggagagtcaactgaggacactggtcatggcagaaagttcctttccccactgagccatctcaccagcccaggattggtgttgttcacattaatcatccaaaacagaaactctgcttccatttatccgaacagtgacttattaccccacccgcaacccgtacaacatttgactttctttctgtatgaactctcctggcctgtcttctcatgtgagtggggtactttgggttttgccttggccttcttctctgagtttgaggtcctcaaggttcatgcattttgtagcagctttcatgattccctctctctccctggctgatcaagagtctacgatatgcatgcattgcattttgcttgtgtatacatctattgatgagcatttggtccttccccacactttggctctgtgtgtgatgtccatgtggacatcggtgtggtggtttgaatgaggatgggctccataggctcttatatgtgttggtgaaatgtttaggagcatttaggaggtgtggcctggcttgaggaagtgtgtcactgggggtggggtttgagctttcaaaagcccaggccgggcccaggcccttctgcctgtgtatcaggatagaagttctcagctactgttccagcatcctacctgcctggtgggtgacatgctacccaccgtgatgatcatggactaaccctctgaaactatagtcaagctcccaattaaatgctttttttaataaactgccctggtcacactgtctctccatagcaatagaaaggtgactaagataattggtatattatgtgcttgtgcctggactctcagttctttggggctataggtagaaattgtttattctggatcacatagctttgcactttggaggaactgccacactgttttaaaaaataccccttttcccccttacagaaagtcagcatcatgaagataataacttttttttttccacagaagcaacagctagctcccttttcctttggtcttgtatggcaacagcttctagccatttaattaacctggataattttaataccaagcccaggtgtcaccaaccagttgagaaacttgctcgatgggcgtttgctaagcacacagttcaactggaaataccagaagagcttaggacgtagtgtactcaaagagcctcagcatactgcagaggatagagtctggggtggatgggcagcattggttaactgggccaaggaagacagctgctcgtcgactgccgaccaaattacctctgccgtgataatgtgtagaaagaaacacagaaacaagtgctttggatccagaaggagccagcagctgctcacattcatggtcctgctttagagacaggagaaaggctcaggcagctaaggcttaaatataatgggaagctgacaggtctagtctggttttgtgtgtgtgtgtgtagatagaattatgtacatgtgtcatatatatataatacatgtttgataaatgtttaattttacatgagagatttatagtcataaagtacttctatcacagtatcagataattatataatagtcaatttatatatgattactttaacaatgaaaatgaggttttgttctgggtagtatccctaagtattaattatatgaaaatgagtaagctatatactgttactcaatagcacagaaaagatgcaaattaccatatgacgatacactaatacaggaaacctactaggagaaaaattcaaagcagaacggtgcattctggtcatactctgaactgttgtccaacaaggggggcgagcgggtgaagtctttcctctatggttttgtccttcttattccatactgcacacattttgccctttattcttagttggataagttgtatcttaatcatccaagacaggctcttatccctagagactcaacggatgctacgctgtgtcttcattatttatgtcagcctccactacatatgcattctgcagcatcaagatttattatgatcttgttcgaagatttttttgcttgattattgaattctttctactttatgaaaaagggtcgtgaccccacagttccactctgactgtcataacaaagtgggaaaatggctctagggtggggagggctttgaatcctttctgattttccatttgcttaatctactttacaggaatctttggaggattaaattaaactaagtagtgtgtgttaagcccagagcccattgtactcagccttcaagtcacaggcattcattttctttaactggtaaaaagaacctcttgcctattgcaggatcgtgattgccccacattcttccccttagttggttcgtccatgggggcaagctggagggcgagtttgttctaaagttcacgaggacacccgagcacataaatgtatagatgggnnnnnnnnnnnnnnnnnnnnnnnnnnnnnnnnnnnnnnnnnnnnnnnnnnnnnnnnnnnnnnnnnnnnnnnnnnnnnnnnnnnnnnnnnnnnnnnnnnnnnnnnnnnnnnnnnnnnnnnnnnnnnnnnnnnnnnnnnnnnnnnnnnnnnnnnnnnnnnnnnnnnnnnnnnnnnnnnnnnnnnnnnnnnnnnnnnnnnnnnnnnnnnnnnnnnnnnnnnnnnnnnnnnnnnnnnnnnnnnnnnnnnnnnnnnnnnnnnnnnnnnnnnnnnnnnnnnnnnnnnnnnnnnnnnnnnnnnnnnnnnnnnnnnnnnnnnnnnnnnnnnnnnnnnnnnnnnnnnnnnnnnnnnnnnnnnnnnnnnnnnnnnnnnnnnnnnnnnnnnnnnnnnnnnnnnnnnnnnnnnnnnnnnnnnnnnnnnnnnnnnnnnnnnnnnnnnnnnnnnnnnnnnnnnnnnnnnnnnnnnnnnnnnnnnnnnnnnnnnnnnnnnnnnnnnnnnnnnnnnnnnnnnnnnnnnnnnnnnnnnnnnnnnnnnnnnnnnnnnnnnnnnnnnnnnnnnnnnnnnnnnnnnnnnnnnnnnnnnnnnnnnnnnnnnnnnnnnnnnnnnnnnnnnnnnnnnnnnnnnnnnnnnnnnnnnnnnnnnnnnnnnnnnnnnnnnnnnnnnnnnnnnnnnnnnnnnnnnnnnnnnnnnnnnnnnnnnnnnnnnnnnnnnnnnnnnnnnnnnnnnnnnnnnnnnnnnnnnnnnnnnnnnnnnnnnnnnnnnnnnnnnnnnnnnnnnnnnnnnnnnnnnnnnnnnnnnnnnnnnnnnnnnnnnnnnnnnnnnnnnnnnnnnnnnnnnnnnnnnnnnnnnnnnnnnnnnnnnnnnnnnnnnnnnnnnnnnnnnnnnnnnnnnnnnnnnnnnnnnnnnnnnnnnnnnnnnnnnnnnnnnnnnnnnnnnnnnnnnnnnnnnnnnnnnnnnnnnnnnnnnnnnnnnnnnnnnnnnnnnnnnnnnnnnnnnnnnnnnnnnnnnnnnnnnnnnnnnnnnnnnnnnnnnnnnnnnnnnnnnnnnnnnnnnnnnnnnnnnnnnnnnnnnnnnnnnnnnnnnnnnnnnnnnnnnnnnnnnnnnnnnnnnnnnnnnnnnnnnnnnnnnnnnnnnnnnnnnnnnnnnnnnnnnnnnnnnnnnnnnnnnnnnnnnnnnnnnnnnnnnnnnnnnnnnnnnnnnnnnnnnnnnnnnnnnnnnnnnnnnnnnnnnnnnnnnnnnnnnnnnnnnnnnnnnnnnnnnnnnnnnnnnnnnnnnnnnnnnnnnnnnnnnnnnnnnnnnnnnnnnnnnnnnnnnnnnnnnnnnnnnnnnnnnnnnnnnnnnnnnnnnnnnnnnnnnnnnnnnnnnnnnnnnnnnnnnnnnnnnnnnnnnnnnnnnnnnnnnnnnnnnnnnnnnnnnnnnnnnnnnnnnnnnnnnnnnnnnnnnnnnnnnnnnnnnnnnnnnnnnnnnnnnnnnnnnnnnnnnnnnnnnnnnnnnnnnnnnnnnnnnnnnnnnnnnnnnnnnnnnnnnnnnnnnnnnnnnnnnnnnnnnnnnnnnnnnnnnnnnnnnnnnnnnnnnnnnnnnnnnnnnnnnnnnnnnnnnnnnnnnnnnnnnnnnnnnnnnnnnnnnnnnnnnnnnnnnnnnnnnnnnnnnnnnnnnnnnnnnnnnnnnnnnnnnnnnnnnnnnnnnnnnnnnnnnnnnnnnnnnnnnnnnnnnnnnnnnnnnnnnnnnnnnnnnnnnnnnnnnnnnnnnnnnnnnnnnnnnnnnnnnnnnnnnnnnnnnnnnnnnnnnnnnnnnnnnnnnnnnnnnnnnnnnnnnnnnnnnnnnnnnnnnnnnnnnnnnnnnnnnnnnnnnnnnnnnnnnnnnnnnnnnnnnnnnnnnnnnnnnnnnnnnnnnnnnnnnnnnnnnnnnnnnnnnnnnnnnnnnnnnnnnnnnnnnnnnnnnnnnnnnnnnnnnnnnnnnnnnnnnnnnnnnnnnnnnnnnnnnnnnnnnnnnnnnnnnnnnnnnnnnnnnnnnnnnnnnnnnnnnnnnnnnnnnnnnnnnnnnnnnnnnnnnnnnnnnnnnnnnnnnnnnnnnnnnnnnnnnnnnnnnnnnnnnnnnnnnnnnnnnnnnnnnnnnnnnnnnnnnnnnnnnnnnnnnnnnnnnnnnnnnnnnnnnnnnnnnnnnnnnnnnnnnnnnnnnnnnnnnnnnnnnnnnnnnnnnnnnnnnnnnnnnnnnnnnnnnnnnnnnnnnnnnnnnnnnnnnnnnnnnnnnnnnnnnnnnnnnnnnnnnnnnnnnnnnnnnnnnnnnnnnnnnnnnnnnnnnnnnnnnnnnnnnnnnnnnnnnnnnnnnnnnnnnnnnnnnnnnnnnnnnnnnnnnnnnnnnnnnnnnnnnnnnnnnnnnnnnnnnnnnnnnnnnnnnnnnnnnnnnnnnnnnnnnnnnnnnnnnnnnnnnnnnnnnnnnnnnnnnnnnnnnnnnnnnnnnnnnnnnnnnnnnnnnnnnnnnnnnnnnnnnnnnnnnnnnnnnnnnnnnnnnnnnnnnnnnnnnnnnnnnnnnnnnnnnnnnnnnnnnnnnnnnnnnnnnnnnnnnnnnnnnnnnnnnnnnnnnnnnnnnnnnnnnnnnnnnnnnnnnnnnnnnnnnnnnnnnnnnnnnnnnnnnnnnnnnnnnnnnnnnnnnnnnnnnnnnnnnnnnnnnnnnnnnnnnnnnnnntaaccttccctccctccttcctcctcccctccctccatccttccttcttttcttcttttggtatgttggggctctaactcagggccttgtggatgctaggtaagccctccccctgtaagctactgccccagctcttgctactttcttcaccatactttatcaattctggggttgaatctacactaaccccaaatattctggaagcatttattcccatgttacccgaaacaaattgtggctgtggggggaaatgcacaaccaactagttggaaggtaacgtgttttggttttattgtttaccagggaatggatatagatagctaccaggtgtctagagtagttgttgacgcagtagagtactacactttgaaatgatgtcaagttggtggcatggccccatgacctgaagaagcttatggatttactagagggaccaagtatgaaacaccctcaaaattagattgagtactaggaagacatgtataaaatactgtgctctgagcccctatgcactactgaaagacaatccactgcagtggactttggattcgctagcgccctgggagactcagggtcatagtttagttcacaaaacaaagtcacagacttcatagcataaaatggtgggttctcagagagcttctgtcagcaaagtaaaataatggttgtcacttttcttctgatgtcagactttatggttgtctttatggatgtcatctttatcagaacacaccatgaattgagtagttatagtttacaaagcaaagacctggtgttatgttctcatgcacatgacatggttgtcgggatgacagtgcacgagtccagactcagagcccagtatcgataatgactcagaataacacgagtggttagggtttggtcatgcagccagctgagtgctttttcctgctctttttttctctctagatccttaaatccaaagacttaacatctcccacccagcgctacatcgatagcaaggttgtgaaaaccagagcggagggtgaatggctctccttcgacgtgacagacgctgtgcaggagtggcttcaccacaaaggttacaaagaaccttctttctctctccctaaatgtggcccccacagcttgtgaactgttctcagacatagacatgcgtacaaatgactccctaacttaatgttttccagacaggaacctggggtttaaaataagtttacactgcccctgctgtaccttcgtgccgtctaataattacatcatcccgaataaaagcgaagagctcgaggcgagatttgcaggtaactgaagctttggttgttactgtgagaatctcttcagggtaggggagaagtgtgataaagtcaatttgcttgtgaaaatcgtgttgtttggtgaggtgtgggaactctcatttatttgagcaatgatttccttagcagtggatagaagaaagcagaaagcgggcctgaagaaatggctcaatggttaagatcggagtttagttcctagaacccacaccagagagctcaaaactgcttacagcgcctgctccagggcaatctgctgacttctgacttcctgtggcacctgtactcaagtgcacacaccaacgcacatacatagttaagaaataaaataacggcattttcttttaaggaggaagggttgggagaaaagaatagactccaggtttttcactgcttcatacctagtgatgaacctagctagttaaccctgtgaactagcagccagttaagtctgtttttcttcacttaagcgaatcaacttgccatctgccgagatgagtaggcagcaaggattccagagaattcatttctaagcaaaacttcaagcatcaacaaatacatttcactcaagaagagtgttgcctcactcctcagcttctgtaactcaccctctaggtgtggggacatactgcctttagctagcttgtacccgtcattgcgagtgccttcccttccagatttctgtagcagctagaagcacagactgagacctctatttcccctgctcatctttaagttgaactcatcaaaacccagagtgaataaagatgctgagggtccaagtcacttggcttattaggcagtgagttgttggttggcgaggtgaaagagaagtccctgcccacacactgctgtggcatctgcctacgtcccctcatgaccccacctgggacctccatccactttaaaaatcctcagtgcccccttggtcatggaaaaacactcccagaggtgtagagatttatttcggtctctagaccagccacgattctcctgagtggagattaaatgcttaaactggcagcctctcgagcatgctgtggggagctcggatttctaaatctcagatggaatcagaaaagtgtggaggatgccataaaataaatgaaaaagctctttctgcacagcttcccaaaatagcattaggtaagggtgactcctgtttcacctaaacccagtccatggccgttcagctaagcctcagtttatgctcattagggaagtcttctgagtagagcagtctcaggaagagagggaaccagcgggcgacaaggcatgctctatggccgtgtgttctgttgctgagagctcgcacacagcccacactgaagatggactaaaataaactgcctagcttgcccttggaccataggtcaaagacttcttgtgtagtgacttttcccagtagcagtcctgtcttcaacacagcaccacctttggacaagaggcccatttagatgtgttccttgtcatttgtgggcagcccgttgtgccatatctgctgctgtggggaatggtggtagccagttaatgaggctgtggtagtcgtcgctgccgtttgtgaccatatacaggggtggagggactatattataaaaatattgctgcttatgtttgataaaggtaaagctaaatgtttattacccaaatgcattttttcaaggtattgatggcacctctacatatgccagtggtgatcagaaaactataaagtccactaggaaaaaaaccagtgggaagaccccacatctcctgctaatgttgttgccctcctacagactggagtcacaacagtccagccggcggaagaagcgcgctttggatgctgcctactgctttaggtaaaggagtgaaaataaaaacccgtgtctgagtctgctggctctcgccttgcctttgctttctcttccgtacattattgacctgagctgaagtcactgcttacggccaggtgtagaggacggtcgagcttttggctcttgtaagaacattcttccccagggctttctaaaaatattttatttatttatttttattaaaatgtaattatagtacatgatttccctcctccatctcctcctttctgtcctatgttccctcccaaattcatgacttctttttcttcaaaagatatatatacaaataaatatatgtgtaacatatatgcaaaaatatataaatacaacctgctgaccctatttactgttacttatttatatatgttttaaggctgatcactttgtgttggataaacacttatggggtgcattcctagggaagactagttctccatcagttggctaccattgattgtctgtagatcttcgtctgggatcagggtcctgtgacatttactctatccctgtctgtatgtcaactggtattggttgtccttgttcacgtcttgtttaagcagccatattgttgaggtttcctgaggattttcaacagttctttttttttttttttttttttgtgctgtggcccttagctctttaatgtgaactgagtatgaagggagaggtttagcccatggggtgttttctccaagtcttgggtcttggtaagttctcatagctctctgcccacagagaaacataagtttccttgagattttggctaggtcagtaagacatgccatgccttgaagcttaccctggggtctgatctttttctgagttacagaaatagcacaagaaggcagatggccataccttgagatgcaaggtctgtcacgagcgagagaactgtgcaagagattgtttgccacttttacatgaatttatgtggggaagatgcgtggtcctctgtgtttcctgtaggagaaggactccttttttaggaacttgtggatcagaggcagggtcctctttgtgaggggttcactatgtcataggtcacaaatggagaaggacatttcagttgccagagacattgagtataccaacaggatccatatttctcgaactctgattcattccttgatctagtaacagatggtaaagcagaggatatattctcaaaggaaaatgcctccaagggctctctgaaaatatgttttattttatccattgtatggataaaccagccatagaggcaggaatgtgcagcagatgttctacagaaaagactctgcccctttcaactgccttcctgattatgcctatgagcattggaggtgtgtattgattttccaggtcacatatgagacagtcagagtacagaatacataagggacagcaatccagggactcacagtgtctcactgttgacattacatgagattataagtcatcaagacccatctcatggtgctcgaggttaatggaataagtgaatgggtcatttttctgactgaaggtgaggtgcatacaaaatcaactccaaaattccttctgctttttctttgaacagaaatgtgcaggataattgctgccttcgccctctttacattgattttaagagggatcttggatggaaatggatccatgaacccaaagggtacaatgctaacttctgtgctggggcatgcccatatctatggagttcagacactcaacacaccaaagtaagtatctggagtgttggtttctcctactcttgcctaagtcagtgatgatggccatgatgatgatgatgccaaactcaacagttgctgtaaaatgcaaactgtatatttaagataaatatctttttttggttgttgcttgctactttttttccttttggcacagtatccaattgtgtagccatggctgtcctggagcttactatatagaccaactggccttgaatttatggcaatcctcttgcttgtgtttctcaagtgttgggattacaggcatgtgctatgacatttgtctctctaaatctttctgactaggactcaaagtgaagatatagctaagtattttatcacgttactttaatgaggacaaagggctaactcagcaagaaattcaacatcagatgccatgtttccccagcccagagaacacaaactttttctgtatactaatatatctaatatatacattattccatgagattcctctctgtggctcatggtgtagaatttaaagatgggaaggacttcagaaacaatcttgttcaaacagaatttctctatagacaacggaatcaggatatagatgctgtgactgcctaaccccagataaaaacaaatctgcggtgacacagaccttggactgcagccctgtttgctttataacccagttcctgtcactccatctctctgagcttaattcctaaaatgtggctgcgagtagaggtttctgctctgctctttatgcttctgtaaatctccttattaaagaggcattaggaacattgctttcactgcagggtaggaaaatgaatctgctgccagagagatcacattgggctatattcaagagttaggggttatcaattattttagacaatctatgttacaaaaatggctcctttctgcatatgaaagattatgtattagtaaatatgaggcctgtttatttataaatgcctgcctggactggaattgaagtggacaaacatggcttcccctcctccagtccctttcccagtgcccctgtaggcttggcactcgggggtgaccacgtgcttggccatgtgagggaagctggctcatgcctgtccctttgtctaagctctctggccagcctgattcatctggaccgcagcagcagtagttgtaacgcaggcaggacctggttgccaagtcgaagcgtaattctcctccctgacatacagagagagtgtatgcaggctgagacctggcttgtttttcaaggagaaggaagaataactgtcatggtcacaaatatgtggtttggatagatccccaagaagccaggggtagcctaataaagtaggcagtgttgctgtgctcaacaggcctcttgtccttggttgaaaacatcccagggaatctcgaggaaaaggtcacttgtttgactagcacattaatggcatccttggaaatgtctctgtcaccactgggtgacctacacacttccatcagtaagagtcatgcacctctgtgatggagaaggggataaagctgcagaaccacatgcaacactttctcttctgccttaggacttgctatttagttcttgaacttagtcactccccatgtggcgtgaggaatggtaacagagggtcgggtactatgattgctttaagtgacctgtaggaaagttgagcaactgggaccagaagttagtggtttgggggaagggtgatcatgatgatgcacacctgaaattctaaaactcaagaggctgagacaggaggattgggaatttatggccaacctgggctatatagtgagttcaaggtcagcctgatttgtgatatagtgtaggcaaccaaggtaagggctgcatcaaagtgaaacaaaacgaagaatgcctgtggctttcaggttgcttttttctccactcttagcatcccagtaattatgcagtcatggtaagaaaacagattgttttaaatgaaaatgtaagttgcatttcattggcccgtgaagacatgtggctgacgacatgtgactgacagatatcctgctgcaggcaggtatgctttctataccttggggcagataacagttcttatgtggatttcaatggaaaatcctctatcgttgaccatccagatgagacttcctggacttacagggcatagacaaagtgagcagagtccctgagtcccagaagctctgaattgatgtggcgatgtgaaatgggtatccatgcaaactttgattccgaatttatataggaaaaaaaaaatagcaggaagcctgaggcctttatgtaacaaaggccagtagacttagtgggaaaaaattagaaaaatctgctacctgaacagtttggtccaatcttttttttgatggagtcatttgtttaatacatacacaaagaaccaaagtcaacttgtgggaaaattctaaacttgctgttgctaaggccacaagccaatctgaccataatttattggtaagaaacaacaacaaccacataagtggatgctcacagtcagctattggatggatcacagggcccccaatggaggagctagagaaaatacccaaggagctaaagggatctgcaaccctataggtggaacaacattatgaactaaccagtacccgggagctcttgactctagctgcatatgtatcaaaagatggcctagtcggccatcactgcaaagagaggcccattggacttgcaaactttatatgccccagtacaggggaacgccagggccaaaaagggggagtgggagggtgggggggggagggtaggggtactttttgggatagcattggaaatgtaaatgaggaaaacacctaattaaaaaaatttttaaaaaagaaaaaacaacaacaaaaacccagtaatgattaagattgtgtactcagaggccctgagctagagaaatggcttggccactaaaatggtatgcacatgagaacctgctctcagtttccatcaactacataaaagccggatatgccgctgtactcccctaacatcagaggggcagaaatggtgtcagagctgtgagtgtggagacagggggatcccgagagttggctggcccagccaatctagccaagccaaggagctataggttcagtgagagacctagcctaaaataaatgagcaaacagtgaagtggagagaggctgaggaagatacccaccatcaccctccggcccctgctcacaggtgcacatgcgcatgtgcacaagaattaaaaacaaaactaatcactgtcttgtgtgtgtttctctgtgttgtgtcacgcaggtcctcagcctgtacaacaccataaatcccgaagcttccgcttccccttgctgtgtgtcccaggatctggaaccactgaccattctctattacattggaaatacgcccaagatcgaacagctttccaatatgattgtcaagtcttgtaaatgcagctaaagtccttgggaaagccaggacacgaaaatcacggtgacaatgacatataatgacaacgatgacgaccatgatgtttgtgacaggagggagggagttttgattcatcagtgtttaaaaaaaaaaaaattggagaaaaaaaatcggtactagttcaaacattttgcaagcttgtgttctgtttgttaaaactggcatctgagattacagcaacaacaaccacaaaaatggaaggcgttagtctgcatctcacctacttcctaagagacacaaaaagaaaacatcttttttttttttaaggaaaaaaataaacactggaagaatttgttagtgttaattatgtgaaaaaaaaaaacatcaaaacaaaacaggaaaatccgttcagtggagttgtacgtattgtttccagcccgcatttcaccccacgcctctcctggttcctctgtattgctctctgcagtgggtgccctccccgtcccttcctccaagctaacagtgggttatttattgtgtgttactatataatgaacctttcattacccttggaaaacaaaacaggtgtataaatggagaccaaatactttgccacaaactcatggatggcttaaggagtttgaactcaaataagccagggggaaggaggtcatagtggatgaccccctgtgagttgttataggactaagcaagtcttctgtggaaaaatcaaagccccagcaaacacgtgtctgccgaagcttcatggacgccatatgcccagaaggcctgttaacaaagaaaacttggaatcagtggcaatctggaagatttttttttccttttaattgtaaatggttctttgccagtttaagcaagccggtgaaatgttgacctgttttgatatgtattgtcagacttttgaccgtgaagtggctgttgatctacaatacaggtttttcctttgtcttggtatatgtaattacatggatactattaaaatagacgggtctagaagccagcatgattgaaaacacactgcagatctgtttttccaaactattaaatcgaaacagtaactactttacatgtaatgtgtagatcttaccacatttttaatattctgtaataatggttatgatttagattgaacttaaatttggacttttttttttaatgatcattcagattgtatatttgtttcctttagctggccagtacctttgaataaaacccctagattttgacttgcactacaaattcaattttttttatatactatcttctctgcctgtattttatgtattgtccatttaatgacatgagctacctgggtccattcctcccccaaccccagttccttctattttccaaaagataaaaaccaaagcccaaaaagctaggtttgagctccacagtgtttcagccttttctgcgtcagtgtgagtcatgtggcgggtgagcggtggggcttctgggatggatgttctgtgtgaacacagaagattgcgcacaaatgtaggcttagctagggtttaagaatctcaactcagagtcttagtgactgggctaggaaaagtttctttaactcctatatttatggactctctttgccgttcaaaagcagacagttcaaaggaagcacctttttctttaattggtttttttggtgctcatggggtgtattaaaagacacacagtttggttgagtttttcaaagggggaaaaagtccaggccagcactcgtcattttattcataatttcatccattatttccctgatttcattgaaatacaggttttgaaagacattctttgcaggctgattaaaaaaaa

SEQ ID NO: 8 - DNA, 4311 bp, Mus Musculus
  misc_feature (1006)..(1025): n is a, c, g, or t
tgttatctgctggcagcaggtttgctcggagcagagctgctgaaactgccggcaggagagcgagtgggagagaaagagagaaggcgctgagagctgagctctggggcaggcgtcagggatggagagaagtattagggtttaaagagccattctggagcaacccatctgcggagagaaggatcggcagaggtctattttagggtcgcaagtacctacttaccctaagcgagaaagtgcaaccttggtggaagctaggagaagctagggaagggtgcgagtcccggggcagcccgcagccaacgcgcccaggaggcggtgttgttccacaggggttaaggaggtggccgatcgctgtcgcccttggccgcctggagcaagaaaaggaggatctgaaggaccgagctggaggctggccctctttgcaggcagcagcggcggctgcaacgtggagcgacccagccgggtgtaggccacagcgcggccggcaggagcgggatcctcgccgcctgctccggcctctgtggatctccggggcggacagtatcccaccgagtctccgagtgagccgctccggggcgcatctgcctccccgcggctcgccaggctcgccctcggcgcgcgcgcacgcacgcgcgcacacgcgcacacatccacacgcacactcatccacacacgtgtggaaggcagggccgagccgctcggtctttgaacttctcagttagagcccggcgcagccccggccgccgctcagcgctccccgcggccctgcgtgcctcctgccagcccccggaccttctcgtctcgtcccttttggccggaggatcggagttcagatcagccactccgcaccgagcctgacacactgaactccatttcttcctcttaagtttatttctacttcagagccactcaccctctcccttccaggagaaaaaaaaaacaaacctttcttactccttaaagtgagagattccccccccaccccgccccagcatcgcatattaannnnnnnnnnnnnnnnnnnncccccacccagcatcgcatattaatatctccacgttgggaacgcgttgcattttcttttttaaaggaatcccagccagggacgtttttctattgggcattaactttcgactgctttgcaaaagtttcgtattaaaaacaactctacctgaccgctctgagaattactagtttcttttttatatatattttttcttactttaaataacaacatcaacgtttcttccttttaaaaacatgcactactgtgtgctgagcacctttttgctcctgcatctggtcccggtggcgctcagtctgtctacctgcagcaccctcgacatggatcagtttatgcgcaagaggatcgaggccatccgcgggcagatcctgagcaagctgaagctcaccagccccccggaagactatccggagccggatgaggtccccccggaggtgatttccatctacaacagtaccagggacttactgcaggagaaggcaagccggagggcagccgcctgcgagcgcgagcggagcgacgaggagtactacgccaaggaggtttataaaatcgacatgccgtcccacctcccctccgaaaatgccatcccgcccactttctacagaccctacttcagaatcgtccgctttgatgtctcaacaatggagaaaaatgcttcgaatctggtgaaggcagagttcagggtcttccgcttgcaaaaccccaaagccagagtggccgagcagcggattgaactgtatcagatccttaaatccaaagacttaacatctcccacccagcgctacatcgatagcaaggttgtgaaaaccagagcggagggtgaatggctctccttcgacgtgacagacgctgtgcaggagtggcttcaccacaaagacaggaacctggggtttaaaataagtttacactgcccctgctgtaccttcgtgccgtctaataattacatcatcccgaataaaagcgaagagctcgaggcgagatttgcaggtattgatggcacctctacatatgccagtggtgatcagaaaactataaagtccactaggaaaaaaaccagtgggaagaccccacatctcctgctaatgttgttgccctcctacagactggagtcacaacagtccagccggcggaagaagcgcgctttggatgctgcctactgctttagaaatgtgcaggataattgctgccttcgccctctttacattgattttaagagggatcttggatggaaatggatccatgaacccaaagggtacaatgctaacttctgtgctggggcatgcccatatctatggagttcagacactcaacacaccaaagtcctcagcctgtacaacaccataaatcccgaagcttccgcttccccttgctgtgtgtcccaggatctggaaccactgaccattctctattacattggaaatacgcccaagatcgaacagctttccaatatgattgtcaagtcttgtaaatgcagctaaagtccttgggaaagccaggacacgaaaatcacggtgacaatgacatataatgacaacgatgacgaccatgatgtttgtgacaggagggagggagttttgattcatcagtgtttaaaaaaaaaaaaattggagaaaaaaaatcggtactagttcaaacattttgcaagcttgtgttctgtttgttaaaactggcatctgagattacagcaacaacaaccacaaaaatggaaggcgttagtctgcatctcacctacttcctaagagacacaaaaagaaaacatcttttttttttttaaggaaaaaaataaacactggaagaatttgttagtgttaattatgtgaaaaaaaaaaacatcaaaacaaaacaggaaaatccgttcagtggagttgtacgtattgtttccagcccgcatttcaccccacgcctctcctggttcctctgtattgctctctgcagtgggtgccctccccgtcccttcctccaagctaacagtgggttatttattgtgtgttactatataatgaacctttcattacccttggaaaacaaaacaggtgtataaatggagaccaaatactttgccacaaactcatggatggcttaaggagtttgaactcaaataagccagggggaaggaggtcatagtggatgaccccctgtgagttgttataggactaagcaagtcttctgtggaaaaatcaaagccccagcaaacacgtgtctgccgaagcttcatggacgccatatgcccagaaggcctgttaacaaagaaaacttggaatcagtggcaatctggaagatttttttttccttttaattgtaaatggttctttgccagtttaagcaagccggtgaaatgttgacctgttttgatatgtattgtcagacttttgaccgtgaagtggctgttgatctacaatacaggtttttcctttgtcttggtatatgtaattacatggatactattaaaatagacgggtctagaagccagcatgattgaaaacacactgcagatctgtttttccaaactattaaatcgaaacagtaactactttacatgtaatgtgtagatcttaccacatttttaatattctgtaataatggttatgatttagattgaacttaaatttggacttttttttttaatgatcattcagattgtatatttgtttcctttagctggccagtacctttgaataaaacccctagattttgacttgcactacaaattcaattttttttatatactatcttctctgcctgtattttatgtattgtccatttaatgacatgagctacctgggtccattcctcccccaaccccagttccttctattttccaaaagataaaaaccaaagcccaaaaagctaggtttgagctccacagtgtttcagccttttctgcgtcagtgtgagtcatgtggcgggtgagcggtggggcttctgggatggatgttctgtgtgaacacagaagattgcgcacaaatgtaggcttagctagggtttaagaatctcaactcagagtcttagtgactgggctaggaaaagtttctttaactcctatatttatggactctctttgccgttcaaaagcagacagttcaaaggaagcacctttttctttaattggtttttttggtgctcatggggtgtattaaaagacacacagtttggttgagtttttcaaagggggaaaaagtccaggccagcactcgtcattttattcataatttcatccattatttccctgatttcattgaaatacaggttttgaaagacattctttgcaggctgattaaaaaaaa

SEQ ID NO: 9 - protein, 425 aa, Mus Musculus
ITTSTFLPFKNMHYCVLSTFLLLHLVPVALSLSTCSTLDMDQFMRKRIEAIRGQILSKLKLTSPPEDYPEPDEVPPEVISIYNSTRDLLQEKASRRAAACERERSDEEYYAKEVYKIDMPSHLPSENAIPPTFYRPYFRIVRFDVSTMEKNASNLVKAEFRVFRLQNPKARVAEQRIELYQILKSKDLTSPTQRYIDSKVVKTRAEGEWLSFDVTDAVQEWLHHKDRNLGFKISLHCPCCTFVPSNNYIIPNKSEELEARFAGIDGTSTYASGDQKTIKSTRKKTSGKTPHLLLMLLPSYRLESQQSSRRKKRALDAAYCFRNVQDNCCLRPLYIDFKRDLGWKWIHEPKGYNANFCAGACPYLWSSDTQHTKVLSLYNTINPEASASPCCVSQDLEPLTILYYIGNTPKIEQLSNMIVKSCKCS

SEQ ID NO: 10 - DNA, 96777 bp, Homo Sapiens
aaatctcccctccccggcaagatcgtgatgttatctgctggcagcagaaggttcgctccgagcggagctccagaagctcctgacaagagaaagacagattgagatagagatagaaagagaaagagagaaagagacagcagagcgagagcgcaagtgaaagaggcaggggagggggatggagaatattagcctgacggtctagggagtcatccaggaacaaactgaggggctgcccggctgcagacaggaggagacagagaggatctattttagggtggcaagtgcctacctaccctaagcgagcaattccacgttggggagaagccagcagaggttgggaaagggtgggagtccaagggagcccctgcgcaaccccctcaggaataaaactccccagccagggtgtcgcaagggctgccgttgtgatccgcagggggtgaacgcaaccgcgacggctgatcgtctgtggctgggttggcgtttggagcaagagaaggaggagcaggagaaggagggagctggaggctggaagcgtttgcaagcggcggcggcagcaacgtggagtaaccaagcgggtcagcgcgcgcccgccagggtgtaggccacggcgcgcagctcccagagcaggatccgcgccgcctcagcagcctctgcggcccctgcggcacccgaccgagtaccgagcgccctgcgaagcgcaccctcctccccgcggtgcgctgggctcgcccccagcgcgcgcacacgcacacacacacacacacacacacacgcacgcacacacgtgtgcgcttctctgctccggagctgctgctgctcctgctctcagcgccgcagtggaaggcaggaccgaaccgctccttctttaaatatataaatttcagcccaggtcagcctcggcggcccccctcaccgcgctcccggcgcccctcccgtcagttcgccagctgccagccccgggaccttttcatctcttcccttttggccggaggagccgagttcagatccgccactccgcacccgagactgacacactgaactccacttcctcctcttaaatttatttctacttaatagccactcgtctctttttttccccatctcattgctccaagaatttttttcttcttactcgccaaagtcagggttccctctgcccgtcccgtattaatatttccacttttggaactactggccttttctttttaaaggaattcaagcaggatacgtttttctgttgggcattgactagattgtttgcaaaagtttcgcatcaaaaacaacaacaacaaaaaaccaaacaactctccttgatctatactttgagaattgttgatttcttttttttattctgacttttaaaaacaacttttttttccacttttttaaaaaatgcactactgtgtgctgagcgcttttctgatcctgcatctggtcacggtcgcgctcagcctgtctacctgcagcacactcgatatggaccagttcatgcgcaagaggatcgaggcgatccgcgggcagatcctgagcaagctgaagctcaccagtcccccagaagactatcctgagcccgaggaagtccccccggaggtgatttccatctacaacagcaccagggacttgctccaggagaaggcgagccggagggcggccgcctgcgagcgcgagaggagcgacgaagagtactacgccaaggaggtttacaaaatagacatgccgcccttcttcccctccgaaagtaagtacttattttgacttccatcccctgaggtttagctctgcccggagctctcaaaaccgcagcagctcccgggatcgcccttccctctcgcggttcccgttcgctcttttcccgttctcctgtccttcaccccaccacctccttttcagttgtatgcttgaggccatcaggctttaaaatgtttactttctactttattttctccatctttcccttccccctaacaattcggtgctttaaaaggcgttattctctttttctcttccctgaagttctttagtcggccaccagctaggagtcagccccactctgtcaaactagaggtgctcccaggggcagagttaaactgaggaatcttggtaggtttgttttctttgctccgattggcgtggagcgcgccgaactggtgcacgaagggttaaaaaaagtgtctcaaaactagcctctccggaaggcgccccctttccgtgctgacctatcagctggttccccaagccttctctattgtctctaactaccctaaaaatgtcagcatcgccgagacaaaacccggtttggagacccctcgagaaacctacctggccctcagtccttgatgtatcatttgctatcactaggtgtttcattacccaaaggcaaaatcctataaccacgttcccttttcacttaacctggagtgtagaaaggacaactccgtttctgactgtgttttaaaaggttttgttcacgttatttttcagaatacactcaaacctgccttcttcacatctccagtgtagcagatcatttttcttacgggtctgttatcctgctcctgccttttcgtaggcttcctgcagttacttcaatgcattcctaaaactcagagtagacgacagccgtattttttttttttttttttactggcttctctgagaacagtgtcctcaaaaccagctggcatacagtagcaataggagtgaaatgatttattgcagaggaagggaacagacagtgtagaatgatttcagagttcttaaaaaaagaaaaaaaagaaagaaagaaagaaaaggggcagcagcatccacttgatacctgagagggttaaataccaggaagaagaaaaagaaaagtgggggcggggtggggggaacctcttcaacatttgtgtattccaaatcccaagtcataaacttttcattggttgctcatttctctcctcccctttccatgccctatatacttgctggctgcctttgcaaagtctctgtgtcttgcctaaatagataatatagccatcttggtaattttctcttaaaggttctagttgcagggtggtgcttttcttttttaatatttatttttagtttgacaagtcctagctatgtgacctgccatgtcttgtacttgatggtctcagaagtcagcccatgtatctaaccccagtcttcctagtgacccttattttgctgcagtttctcctgttcttgttcaatagcagaacagatgcagagaattctggcaagcaggatgattttattattgtaattatggcactatccgcaacagcggtgataaatacactccacccctggttatcccctttgggaagtaaagctttctatctggggtggagccaaggagatattaggaaagaaagttcattgtaattagtccaaaaccattgagacaaacaaggagttcagtcagtttgctttctctagcatgtgcatcggttctaccggtatttgggcagagcggaaagtatgttatgtagaacctgaataactcatctttcaatgtttatatgcaaaaggtctaataaactgccagcacttctataacacagaaaggagctctgatcccatttactgaataggtgtggagagagcaagtaacccaagagggcattagttctttgttctctgaagcacacttcagtctgaagagctgagatgatccaacccagggtcatggtcatcaacaaactggaaaaattcctagattattaggaggatttcagagtatggcatttaacatcaatgtgtggattctcctttccatttcaccccagccaccaaataaatgaaaacctccgatacgtccaagataaataaaatatactgccagttttcatacaaagaatacaggctttaaaaagtctgtattctgtatggaagtttaggagcagaaagccatattaatagcaggttcgatactactgtgcaaggactggataattttatagaaaataggttaactgattttccagcactttttagttatactggaatatagcaaacccttccaaaaaaaaggaaaaaaagaaaaaaaccatatttttaaaaagcaaattgaaagtacagcattggcttatataccagctttccctctttaggacttttctgcctaacttttaactcagctgtcactgaagtggctgtggggagggagtgtgcctgtcattccttgcagtgaatctggcgagggtcataagccccagagatgaagccatgggaaagatcactggttcattttttaccatcaacttattagcgttcagggagtgacttcagctcaagtattacaaatatgctctaattatactcaatgagctatatatcattacagattgctgatagccctttgtgggacattttataaagttcagactacatatttttagcaatgtggagatttaaaagtaaaaatataagagatattgtatatgccctgaggcatattttgtcttaaatattatccttggccaagtatactatataaatacagtaaatatgaatagaactggccaggtgccaatctcctaggatgaattttagtcaagaatgtatttatgggatataaataatactgtgtcaacatttaaagaaggggtctgattagttttgaatttattcatattgatcttttcacgtgctgttagtttaagactcgaagtggagttatgctaaggtttaccgatagtttgcccactgggaattagtggacctctagtagtttaacaatccatttgaagttcgaggcacatctattcgaaagatgctgcacaaggttttagaaacttagaaagggtgattcagttatacacaggaagaattcaaataattgacatgtaagaatctgtagagagtccgacaatcaaaaagaggaagagacacaacgtttcattttctttcttttctctccctttttcattgtaaccaatcagcacatgttgtggttctaaccctggtgattttgtactccccccaacacccgcacccctactcccactggaacgtttggcaatgtccagagacactttgggttgtcatgactggaggtggaggggtgctaccggtatttagtgggtcagccagggatgtttctaaccatcctataatgcatagggcaaccccccattcccaacatcaaagaattatcctgaccacaatgtcagtaatgcctctgttgaggagccctggtatttgttgggggttactgaattctgttaacagtaccatttagaaaataataacaaaaataaaatatctttatgatcaaagcatattcaaatgagaatactgaataggaggatagtcagacagttatcttaattaaatggagtgtggattagaccattgtatacagtatgtactttattttttgtggtcttaaagcccctaaattagagacatcaaaacttcccatttatttagcttaagtgatggtgttgacctatccattactagcttcagtcagcagcagtgtgatgttagaacagagaaaaaagaagtgaggaattatcatggattccccttgcaagggaaataagcagtttgtgttaacaaagagtggaatctccaagctaggcaatggaagaaagtaaataatcatcttgatttattctaccattttgaagtagatacactaaaaatatacagcctgaaaaatcacaatgagattccctttgtagttgtttcacatgagtgttaaacatttaacatgaagcaatctccttttctatttcctctgtaattttccaagttaaattgtggaatgtagaatgaataccaatgacactatggttttggggaatgtgacttagcattcaattcatgaatatgtctttctatatacaagttgctggtctgttggccacttgcccaatgaaggaaaatgttagcgattgctggaacgtagtggtatttttgctttatgtagtaagcatttttactattttattttttaggattctctgtgtgtgtgtttgcatgtgggtgtatgagatagaaacagaaagaaaaagagagcgtatcaaagacagacttgaacttcttgacttccagaatgattgagttattaatatacaacagaccaaactttaattctcccttttttattgcatcgttgcttgtactaactctagtgtctaattgtggttacatttaagttaggtcacatgctcctccttcaggatttcctcttttttttacttttcaaagactagaaaaacctctcaaagaagtatactatttataacgaaagcagttgggtcgtctttgttgccaagtgaggccagccagctttatgcctctcctgaggagaccccacccgatgaaagaggggctttgcagaggttgaggggcaggtggggacctctccacctcacagaaggaaggggttgggggagcccactgcgtctccacagcaacccctgtggtctactcgaggagttgcactttttgaatgatttctccctggtgaaaagatggtgatgtaacctagtcgcagcatctttcatataaagatatgaaagaatgacagatcgtttttcctagaggaaactgagatgtgaaaaaagggctaatgactcactgttgaacccacatcaaatctgggttagaaccaaggagttcactgacttgtaggccttcgcccagagattacaacacactttaggctgcatatttagaaggttcgagaaattagagtggaggctcctggccctgggagaggtgtgcagggtcaccactggagtgggactctggcccactgccactccagcccgcctccccctgccccttgcccacagcacccccaccccaccccgccccattataggttcaggagtaaggtgagcagccgagcaagagactgcatggaagagctctggaaatagccccttccgctatcttgatgtagcatttccggtactgatgggctcccggagagaggatttggatttgccagatgtgcttgctctatttaggcagcgcttctgctcaagggtggattccattttgcagattctgcacagcttgatgaaatgtggctctgcccgagataaacaaatgcccattgtcattttgaaggcatatgtgtgctttcattttaaaaaatatcctttaaacaatgatagtttttaacctgggaattcaacgttctccaggtattttattttagatttaataatatgttaggggattctttgatgggtttgtttagactgaaaagtttgcttctgtcatttgtttggaataaatttgcatcatgctacaaccacaagctgcttttgatggttggctgttttgtttcttttctaagcgctgatatccagaagtgggtgtttaagtgccccacactctcaccactaccttacttcctgaattggcttggtggtcttgactctgaatgaaactgccccttggcctcttccctaccatctctaaattgccttcttttccttcattgtgatggaatgtctgcatggatggatggtcgagtgctcacatatcatgtcccatttgatactctactgagtttgtgggagacagcaccccctttacttaaccaggcctcagtttcttcccttgtaaagatgaagaaagtaacactggccttctagggttgtaaggattgatgatgacatatgtgaagaagcacctagtgcagctgctctggcatggagtaggtcttctttgcctggcagcaattctctgagtctcaaatgcctttgacttcagggtataccattattttatgtgccactaagaaaaaaatatcacttcagtgatcatgccattgattttaagagagggtctggattttagggagatgaaaatgtgattatgagcgataccccaggaaccacttccattaacctcggatgtcttggaacctccagctcattcttttcctttgcgatagttccactcagtggatctctttcctttgctcactcagtttgttccttaggtggcctctgacacttcagggcagggatgggatggggctggaaacagagaacatagggttggtaattcaccatgtctggcactatccagttctcctatgagaaggcctgagagtttaggcaattagattcaggcctttcagggtctggtccctcctccttgctcagcccctcctctcactaaatccctgcatgaaaactatactccagtcacattgtcctctttgcctttacccaaatgggccatttattttcatgcctctggggtctttgtttatgctgtttcttctacatagagatctatcttttcacacctttaaaaatccttctgcctggtgtggtggcccacgcctataatcttagcactttaggaagctgaggcgggaggatcacttgagggcaggagttgaagaccagcctgggcaacatagcaagatcttgtctctacagagaatttagttgggcctggtggtatgtgcctgtagtcctagctacttgggcggctgaagcaggaggattgcttgagcctaggagtttgaggctgcagtgagctatgactgccccgctgtcctccagcctgggcaacagagcgtgaccctgtctctaaacataacaaaataaaacaaaatatttctgggcttagtcagatgccacctccttagaaaaccttccttgattgtcctagtcttatttaattagctcttcctttgcactcttactatactgatggttatctctatctctccctcttttcttttgatcttagtaagatctaactctgttctgggctgtcttcttcattggtttgtagactgccccaggaacagaaatcaagtctaacttatctatattcttatagaacttagcatattgtgtttgatcaaggaatgtttgacaaatggatgagcattccctttacagaatgagattgaactacaggaagaagaagaatctgtgagttcaaagaggtgtcagggccaggagatgcggagagatgaaatgttctgaccttcattatcagggaaaatgtgtctgatgggtcatgtcactatgctaaagagcacagggattctcataaccataatattttctgtttccaattctcagataataatgaaggtggtgataatgatgattaaagctaacctttattgaggactttttacaggccaagcatagctaacctttattgaagacttataaaccaagcatagttttaaatattttacatatatgtactctttaatactcacaagcaatcctatgaggttaatactcatactgtccctttgacagctgaggaaatggaaatagctatttctattagtgatgtgttatggaaattagactttcagccaccacaggtaataggagccctaatacagagcccaggaaatagagagcatgacctttcttgccttcttgataaatgatgtaatacatccatggaagaatggtggctctcctctgttaacaagaattacattcacaagcactgagaaaatatacctctgaagcacacaacctgggtttttttttcttgcctcttaacacattcaacttttatttctgcacttaattgatacaaaaagtgtgatttattaagactttggttgtttctgtttgtttgtttgtgagacagagccttgctctgttgtccaggctggagtgcagtggcaccatctcagcttactgcaacctctggctcccgggtccaagcaattctcctgcctcagcctcccaactagctgggattacaagcatgtgccaccacgcccagctaatttttgtgtttttagtcaagatggggtttcaccatgttggtcaggctggtctcgaactgatctcaagtgatccatccgcctcggtctcccaaagtgctgggattataggcccgagccaccgtgcccagccttggttttgtttttgaactgcaatcattttcctcacaaaaattttgataaattttattgatagggcattcctatttcagagaattaatttatttgggaaggcaagatgatatacaatgagcatgatgactttggagctggacagacccattaaataaagaaaggagaataaataaaagggaattgtaccaaaggaatctcaaaggctgaaatggaagcggtaacatcaaagacaagaaatcctactccaggcctgtggcagttgttaaagagtggtcctgttttggttagcaacttggctctctcagtgcaagtcattaaaactgcctcattgatatttaagttgcttcctaccgaattcagatcttggctctgccactgtcggctttgcagctggatttgaaaccccttcacttagcccagcctcagtttcttcatttgtaaagaagaacatcgactttctaggggttgtaaaggatgatgtgtgtgaaaaagcacctggtgcagctgcttctggccttctttccacagcagctattattcatcgaatctcattgactttaaaatgcaccactattttatgtgccactaacaaagaaatatcactgcccatttaactattagttataacattaactaaatgtcactgccaattaactcagccattgattataagagagaatctggattttagaaataatagaatatgaaaaatatatagaatcagtgaaatcacataaaggtttgtgaaataaagaatagcggtctatgtgcacatggtatagagtgctatagcagaagtacatggaaaatgaaattaagtggaggcatgacatctgccctcagaaacgttttctagttaatgaatgttaggagcccatctgtggaatcaagaacaggagatccacatagtatatactcctcccagccagagtcttggaaatcaaaatttttttgtttttattttatttttgacatctcaagatttaccatttgtttcaaagggtatataaatttttaggggaattttttttttttcgagacagtctcactctgttgcccaggctggagtaagtggcacagacatggctcactgaagcctccatctcctgggctctagttatcctcctgcctcagcctctacaatagttgggaccacaggcatgcaccaccatgcctggctaattttttcaatttttttgtagagctggggtcttgtcatgttgttcaagctggtcttgaactcttggcctgaagcaatcctcctgcctctgccttctaaagtgctgggatcacagatgtgagccaccgcacccagccgggaaaaattatttaaactatttgaactgatctctgaaggttcatatgtgtcacatagtacttgcctctttatttttctggatcccaaagtccaaaatcaaagaacagaggggatgttgcctataaaagactgacatgcaggcggggcttctatgtaatgtgcttctggggctggtttcgcttctcctcacaggtgtcctgtctctcatcacttccactggttgaaaagaaaccaggacatttggagtcaaggctgaggcaggtcaggcagctgtggttatactcatgtagacctcatctcacctccgcaaccaagcactggccacagccgcctcttagccttcaggcaattcattttaaaggcggctttagcaatagtatgacattacggtgtagaaatctaaaagaggaggccgggtgcagtggctggcgcctgtaatcccagcactttgggaggctgaggcgggtggatcacctggggtcaggagtttgaaactagcctggccaatatggtgaaaccctgtctctacttaaaatacaaaaattagccgggcatggtggtaggcgcctgtaatcccagctacttgggaggctgaggcaggagaattgctcgaacccgggaggcagaggttgcagtgagccgagattgcgccactgcactccagcctgggagacaagagcaagacttcatctgaaaaatgaaaaaaaaaaaaaaagaaatctcaaagaggaagctggatgagatgaaggggaggggctggtcgagagtaactgcagagggtttgaggagtagaaatgatatcagagaggggaagccacactaaggccttgggtagttgttcacagtgcaacatattctctcagtgagttagcatcctggctttcctggggcaacccagtaacaccacttcagtgatgtggaaaaacattgctgtccaagaggaattgaattcactggctttagtgtctgttaggagggaaagcctcatcgtgctgagaaagcggtcctccctgggccgggaccatcccttcattctctcaaatgaacgcttggatttgttactgcctgataagtcagaaatgtttggcttagatgttccctcaaccacaatgacttgaggaacttaaggcaaatggaaaatgcttcctggatattgtaaagtccaaaccttctggaaatagtttgaatgcatttccatccctccacaggcagctgtttttctctcacactagcatgttccactagcgtgtccccgtccctcaggccttccaagctatctatatgtcggtaattatgaaacaggttatttctgaagaagagacgctgcgtttctgaagaaaaagtcatggagtagctatttaagaataacactggtcttttggagttgttgtttcaggaagtactgtagtatctttttggtcttctgaaagaaaaagaaaaacgttgtgactgtgactttggctctgtttattttacttttcttatctaacccacacgacactgacaaataccacatctgtcttgacaagctagtttgcaaataactattcattcataattttaggctattgtaagaatccttatttgttacttcatcttgtaagcaagaatgcaaaatttggttttgagaaagacactgaaatgaccgcaagtccactggtctttgcaaatctctccatctgaaaaagatgactgtgtactttttagtggattttcagagctctaaaatatttattgttgccaaaacatagatgggaattttctgagaaatataatttaattttaaagttttggattcatttcagtgttggtaatgtcagtgcttcttagaccaagtttatcagggatttttctgtttacaccagatgtagcagtaactttgtcatttcttctattttgattttttaaaaatatgatcatttattcccctatctattggcttaatctcattttcacttattttcacttttgctttgacatcttatggcaatatgactgcagttgtttctacttcctttatagtgaactcttttttttttttttttttgagacggagtctcgctccgtcacctaggctggagtgcagtggtgcgatttcagctcactgcaagctctgcctccggggttcatgccattcttctgcctcagcctcccgagtagctgggactacaggcaccccccaccatgcccagctaattttttttagtagagacggggtttcaccgtgttagccaggatggtctcagtctcctgacctcatgatctgcctgccttggcctcccaaagtgctgggattacagtcgtgagccaccgcacccagcagtgaactcttgtaataaaactgctggcttagaaactccagaaaagtgtgaatgacttattctgattctactttagacagataaagaaacaatcacagatggaggacttttctgtgcaaaggatgggtggtttggtcaaggaacggtccccccagaggtcagtcagggctttctgtggggaaaatgtttctacattcaagttcatccttggcattttgggctctgcaggttaacgagagggagacagaggaaggagtgcaccaaacctctgactcctacctggaagtagccaagcagaagcaaagctgaataatagccatgacctcaggctctgaagcaggaggttccaccttcagatggatctgttaaacttcaccaccctgggtttcttgtacctgtcttcactgttttctgtctgagatatcttgaggcatttttaaaacattaagttgttttggatagtaatttagtcactcatttgtatctcttcatagtattaagccttaggttattatgtgtgttaactaaaatcactgatcggatctctaaactaagtcctgaactgccatgattccacctactaaacttacacttttcttctacgtagaatgaggtgaccggtgctagtttgtcctggagagagaggtatttcagaagaattccactgtcagaaaatatcaccatcaataatgaaactatgtgtgtaaagtcatgtctaattttattaactgtttgtcacaagtactcagattatagaaagagggtcttgatctaagctgaccctgaattgttatacatttggatcagttttccctttcttgctgagaattctctaagaagagtagaaactcattgtagttcagtgttgggaggaatgattgtacccacttacagagttgctatatcacaagagagatgcattgtttgtttgtgtggagaggctggagggattagggcaggagcttatttgatagggagtttagttgtacatttgtaagacatctaattttacttaagatatcattgcagtaagaatggctttatctctatcctatagaccctcacagtagacaaaaccactacctactcagaacaaatagcccttatgagggaataatttttccttgattcacctgattggattgttttgaggtcaaatgaggttctgtaaaaggccttgctaacctgtaaggcataataacctgtaccagggttctcaaattttaccatgcaaaataattactgatgtacctttataaatgtagattcccaagcctttgtcagccactccaattcagattataattcagttcgttttaagatgggctccagaaacctgcatcttgataaggcggccaggtgatccttgtgcagatagttcagaaacatactctggaaacactgtgtatttttgttttgttgctttatttcttagctgtgtcattgcaggcaaaaataaaccccaacattgttacagttaattaacttcctagtcatttaattactttgtaaattacccatgcgaagttttaattctaggactgtttctattttatgacttgtgttacccatagtcccccatcataaattagtgagtgcctgcgttcttctaaaaatatcaggtttctcacatgcacgtagtgaggggaacaacacacactggggtctgtcagtggggatggggtagggagagcatcaggattcattgctaatgcatgcagggcttgatacctaggtgatggggttgataggtgcagcaaaccaccatggcacacgtttacctgtgtcacaaacctgcacatcctgcacatgtatcccggaacttaaaataaaataaaataaaatttaaaataaaaaaagttatgtttgtaagactataaatgcctcagattttgagaattctttacatttctttgttacaaagccttttcgcatatatccaaagcctcactgttctaaacagagtgtatccatacctcagtgctgcttcaatgatgtagatgattgaaaactgattttttttcctttttctgagacagagtctcactgtgtcacccaggctggagtgcagtggtgtgatctcagtttactgcaacctccgcctcctgggttcaagcgattcttctaccttagtctcctgagtaactgggactacaggcacgtggcaccacacccagttcatttttgtatttttagtagagacggagtttcaccatattggccaggctggtctcaaactcctgacctcgtggtctgcctgcctcggcctcccaaagtgttgggattataggcgtgagccaccgcgcccggcctgaaaactgattattttaaaactaaggtttgctttctgtagactgaacaatcattagcatccttacatctctatctcattcatggtcttaacttctaaggcattggatcagcaccagagctccctgtcctcctgccttacttaaaaacaaaaaagaaagaaaggaaagaaaagaagggattttaatgctgttttatagcagagtgaaagtaaaccaaaggtgcatacttgagaactgcaggctggaaattgcaagtgacaataattacctcatcttattcccacacagacttcctatgacctgggtgaccttgggatctgaattctgtttaatagaattgtccctcttctgcaccacggcgtacactggcctgaagaaggtgctgtttcccaggaaaagcacttaaatccccccaagaaatgcatagggccatagtttgaagaaaaagtattgctaaccaagtgacttactctgcatattctacctttctctggttgtattctttgagatttttatttaagataactttcagcatctctttttaaaggtcagatacgaatgagaaaactttgtctgacttgttaatcttgtgacaaaccgtttatatccagtgtagcttcctgtctttgctgactggttatttgagggaattttcttcctgtaagactgtggagaagcctctaaaaataaacagcatggtttcttattggtgggaacatatgtgagcagatgtcagctggaagcagcatatggtggcaacatgatagcagtatgtgcttatagaatccccgctgttgggtcttcgtcttccatgccacactggccagtcagagccccatatctcagttaaagagtgttccgcctagaaggtgtaatccacacatttgtgaaaaatctgccactgggatcttgatagtgggctgaatattggacatggtaagttccagagtatggaaaaagtctttgttatccatttaaaaatcaagtgataagaggcacacatatggcaaaaataaaaaataaatcaagagaagagtccacaaagcctttgtcttgtgttgaaagaagttttcaagtcaggtctgaatagtggcagtgttacttctagaagacgtgctctataaacatggaaggtgcatggactcccagtgtatgaaaggagccaggaaagaatgatattcatgccaggccctaataggcagtcagggcttcttttgtcacacaagttagacaactgctcatattccttgaccaccttttgtctgtcagtctgttttaaatatatcatctcatttcaattttataaaaaccctcagaggcagggttacgtctgcctcatcttacagacttctccatggattcacaggaaatcagtgacagaacaggggtttgaattaacatcttcttctgcaaaaattctatatttttattgaccttaccaccaatggaaaaagttttgaacactcagcaatatttcctcttcaatttgagatattttgtgggggagggggtgtgctttcttttctaagaatatggtgggcaaaatacaaattgggttgctgttactttaaagaaagtgaagttcaaattttccagatgtaataactattgtggaagatgcgtttagtccatttcagagagctctagctttttaaactgtaggtaagtagccccaaaccaatattcacttgtatttttgactcattcaagaaggagttttcacatgcgggttagaaatgatgacaggtggttttaagaacactgaaatctaggccagccaaatgaaaaccaaagttttattcttaatcggtagactgtcttttgtcaaaggaggtcaaagcctttcttattcatctttaatataaatcaaggtatttattttaccgtttcagtatgtaaattgtactctgttattttaacattagaacgtgctaaagggaaaactgaattcaggagtctgactgctggttaagggatgccagaagatctgggactaaaatctggaatcctccttagatcctcagtgtctaatcccctggccccaggtagcagggaccttatttctggggaaatgataagaacattcaatgagtccctcttctactttgaatctttgtatagttctgtgccaggcatctcttcagtaaaatagctaatgactgtgctttttaaaactcctagctgtctgcccagttgttacaacaccctctggctcagtgggcagcttgtgctccagacagtcccaggtgctctgtgggtaccttggtgagtacacttgtctgctttattcctcgtttgacatagttatatcaaatccatctttagtgtttgtctcctgtggggaacttgccagaggcaagatgagattctgaaatgcagccttgtacctgagcgatcacaaaggtgcctagaattttttttagtaagagtttacatgagaaaaactgatgaatagctttgaagtaatgcaatgactatattgcagcatgtaaaagaatgacttgtggggatgagatatgtgttttaggggtcacagagtgatttgacatacacctttcctgatccccatggaggccactctctggagggttggacagcatggcctgaatgtcaagggaatgttcctttttatatctttatttgtatctatgttcttgttcttgacacatagtagttgctcaattaatgtttcttgtcctgaaccaaagtgaaaggagattttctctcctttaaggttctagagcaagcttgtccaaccctcggcctgcatgcagtccaggatggccttgaatgcggcccaatgtaaatttgtaaattttcttaaaaaattatgagatttttttttgcaatatttttaaagcttatcagctatcgttagtgttagtctattttatgtgtggcccaagacaattcttgtttttccagtgaggcccagggaagctgaaagattggacgcccctgctctagagggagacctgtcggggagttatgctgctgattatttgtgacctttgtattgacatgtctcgtttgcttaaggaaatggatcgtcatgggtcaggccctcagccaactggacctgtgagcttgccacttgctcaaaccacttagccctgaccctcggagcaggtgcaagctcctcagagccagcaccaggtgttaggctgaggggtacaaaagccagaagtcctcaaccctttcttattgggaacactgattaattcagccatttattgaatgcttactatatgctggacgatgagtccacaacaaagaatagagcttgggtgatcctgacgctcaaggaattcagtggctaaagttatccctgaaccatgctcaggaaaaaaggaaacagacttgcaatcctggcattggttcactgcatatttttgaggccctgagaaggtttggattatgttgattctaagtgtgggtggaggtcccggctagagacaaaagaaatgtttttattatcctaggaaaagcctaggtcactggataccctattctgcaatgtatcatgcctacacattgttggttagaaatcagtatagtttatttacagtggcctaagctggggtttcctcaaaaagaactcattctgttgagaatatacgttgattttagtacagagagcctcaaagtggctacaagctgcaatgtgaataaaaagagtgaaaagtttaatcatgcctttaaagctcccgtttgtgagtcattacgttttgtttttatactctaaattctaattttatttcactagctcaaccaaggagttaaacatctgattttttccccctagctaactggctatttggaaaggaaaacgggagggaatgagagaaagaaaacatttgttgaataccccctatgtccctggtacttaagacacatcatcctaattttccccacattggttggtcagggagggccagaatgacgatccccattttttaggaaatcgtggtttggagaggtaaacaccttgtccttggtcacagagctggctggtgacagagccaaaatctgaattcaggtctggcccagatgccaccataccacagagaccccaaacttttccccccttttttggcttttcctttggaatcctgtcctgttaattttgtaactttcttgcctactacttgggattaatttccttttcatcttttcctcccatagtaaacaaagtgagaggcctaccctggttcttcgggcggtttttcttctcagacactcctcacttggggttattttcggtcacttaattgctgcgagcttctgtcttcctttggtgaaaaagcattggaaacccaccctgctcctcagcgagtcagggaaaatcaggagtgtctgagggtgtggaaggggagatggggcgcaagctccacatagattcccataacagtgggaggctcttccaccttgcctagctcgcaggctctggaaaaaccctgcagacccctttcagaccttccctgcaaggctgctgagcagtggggctctgcatttttttttttttttgtctctgttcttagaaatagtaattgagtaaaaatgtaagtgagtgtatgccagggggcaggcatccagggtcagggtgaatttctccatgctgagtgtgattctgaacactcgttaagtgaagttggcctgtgccaagcagctccagggccatccctgtcaccttgcgtgaaccgcctctccattccaaggagatgttgggagcggctgaagtgagcgtgaggcctgtggcgcctcttgcttttctcactctaacctgggtgttgttgataacgacgtgttctgacactgacaattggactggcagctctgatgctgcatcagctttaaattaaataccctggaggagaaaatagtccatgctcctcacagccatgtgactgcgaaatcatttttctcttttcaagcttattatccccaataatattggttaagatgtggttagcctgcctaaaggttttcctattaagacataagaatccagtgtgtaagcagtagagataagtctctctatgaaggaatggattaatagtcatgaaggcaaatataattttttaaaaagagtatttactgaataagaggcttttaagtaacttggttaagatttaaaggtggtatttctctctctctctctttttttagagacagagacaaggtctctctgttgtccaggctggagtgtggtagcatgatcatagctcactgtaacctctaactcctgggctgaagcaatcctcccaccccagcctcctgagtagctaggaccacaagtgtgcaccaccacactggctaattaaaaaaaaaatttttttttagagatggggtcttgctatattgcccaggctgggctcaaacttctgacctcacacagtcctcctgcctcagccttctgaagtgcagcgattataagacatgagccactgcgcctgacccgaggtggtgtttctcaaagtgtgatatgcatttctgtctcctgggacatccatcagatttcttggccccatttcagagctgccaagtcagaatcactggggtgggtggagctgaggactctgcacattttaaacaggcactgcaggtgcttctgacgtcactaaagtttgcagctgctcaagtcaaaggatgctctgattatgcacatctgtttactcagtcataccacatggatggattcagatccagtggactctctgtttgatcagctggtccttcaagtgtgaccctgaacctacagcccctgtggagtttttgccacgtgctttccattttcccaaatgcaggcaaatattgaggtagtttttaataatattacttgttattaagagtaccacacataccctctgctcactgttcatcacagaggagaacaatgagtgtgcaaggaagtaaattaatcgtgtgtgggtgttggatgttatgtatttctgcactcagatgccttcaaccgggcaacggtggagtggggaagggactttcaaagctagtgtttaatgcataagtgacacataccatgtataaggtaatatgtaattccctgaggtagcatttggccaaagcgctgctgacctcttggtggcctgaatcgtgttctgagacattccatggggtaaggacctagcaaacaatggaatgtaaactttactatctcagccaaactcagctttgggtaactgcaggtttctctttccaaacagtgttttgttcaaccagaggcattagagcaggcaagaatctgaccaacctattaagaagcaaagttaatgataaatcacttggtattttctttgtgcaaccctgtgccccctggtattctgatgtttttgaaccacctaatactttgaagacaactgtacagtatggatattctataactaccgtagattttttggctattgaactatttacagaaatacccagttctcgtatgtggtctacatcactaaataatctgattgaagtgtgagaagaatgacttgatagtgttcattttacctccgcataagtcttcagttaaaagagctgtacattaactgcaaatacagatataattttaagataaatgtcaaatgcatgtagagacctttggaagagaaaggtgaagagaggacgttcattttttttcttcttcttctttttgagatggagtctcgctcctcgctctgtcaccaggctagaaggcagtggtccatctcagcttactgcaacctccgcctcccaggttcaagcaattctcctgcctcagcctcctgagtagctgggactacagccgcacgccgccactcccagctaatttttgtatttttagtagcgacagggtctcaccatcttggcaagtatggtctcgatctcttgacctcgtgatccgcctgcctcagcctcccaaagtgctggaatcacaggcatgagccaccgtgcccggctgaagagaggacattcttatgatatattagttcattcagctgtatttattttattttattttgagacggagtttcactcttgttgcccaggctggagtacagcagcgtgatctcggctcactgcgacctccaccacccgggttcaagcaattctcctgcctgaatctcccgagtagctgggattacaggcacacaccaccacacctggctaatttttagtagagacggggtttcaccatgttggccccactggtctcgaactcctaaactcaggtgatccacccaccttggcatcccaaaatgctgggattacaggcatgagccaccgtgcccggcctattcagctgtgtttattgagtatttacttgtatcaggcagcagtctagctgctagtgaattgaatagcaaaaatccttgcccatggggagcttacattctggtggcataggatagataatcaataataaagatgaaataagaatttagaattggataaatgttttgcaggggaagtagagattggtcacagggatgaggatgtgaggtgtaattttatataagctgggcatggatgaatttgttaagaagggagtgcatgtaagcagacacttgaaggatgttagagagtaatctgggactacctggggaagggcattctattctgttccattctggcagagggaatagctggttctgttgtgacatgttcaaggattgtcaaaagtatcctagggatgagattagagagataatgagggataagtgatgtggggccttgtaggccatcatcaagtctgtggcttttcctctgactaaaacggagagaagagtggttttagccagagggccgtgtagctgttaagaatggtatgttgggccgggcacggtggctcatgtctgtaatcccaccactttgggaggccgaggcgggtggatcacaaggtcaagagatcgagaccatcctggccaacatggtgaaaccctgtctctactaaaaatacaaaaattagctgggcatggtggcatgcatctgtagtcccagctactcaggaggctgagacaggagaatcacttcaaccccggaggtggaggttgcagtaagccgagatcgtgcctcttcactccagcctgggcaacaaagcaagattccgtctcagaaaaaaaaaaaaaaaaaaaaaaaaaaaaaaaaaaaaatggtatgttgaatggccaaggtggaagtaggaaattcagtgaggaggtcttcgtgatgcatcaggatggcacttggcaactgcatttctatagcaagaatctcaaacagacctgccttatgctgagtttttcctttagcaaacagtttgataggcaggctacagtgggttttgtatttagaaaatgtttttctgtttgatggtttttagttaatagtccttagttattggcaactcacccccttcctttctgaggagcagccagttctgcagccttctgtgtgtgaaaataaccccttgggtctcccatcttgtgctcacgcatgtggaatggcagctactggagttcgtactcgcggtgaagcctagtcatggccgtctttgacatgatggccagggacatgtggcactatacccatagctgaccatactttggcctaggagaatgtcaaactgccttttccggtgtgaaatagaaagtcaagcttggaaggatccttctttggatctgtccagctgtgctctgcatgcaatagaagggcttttgcctaaactttgaaatgaggtcataagccagagaatttgtaaaactatgtctcttatcagtcaaaaagaatttctgtgggactgaagtttgctttctaattcttaagctttgaacaggaagactttacacggggatgttggtgttatttcttcatccatctgtacaagaaacatgagttgagcctactgtgtgccaggtgataggtgtaagaaaactgcatagatcctgtcctcagggagcctgcacttagtgaggaagtcaggcagactaaaccaaccaaacagaaacaaaaagccaaccctgtggttgatgacaaggaaagcatctgagaggccagaaaaagaattgtacaacttggcctagtggtgaaggaagccttactgggggagatgatatttacctcttgaaagatggcctttgagattgtagtttggtagtcatcaagcagcaatagaaaactgcttatgttttctggaaggagatttgccccttcatgtaatttctttctctgtgagtttgcatgactactgtcttaatgagtcatgaaacaccaagaaatgcttagtgtggtctttgaaaaaattgatgtatttttacaagggaacaactttgaaatactgagactagagaataggacaatatggttacatcaagtatttgttattcaaagttgatatattcagaagacataatgggcctattgtatataaacatccatgtgatgatatagtatactgggactctggaatttggcattattttataagctcagggtcactgtctagagcttttctctcaatctcagtgagtgataaacagcacaggtttctcgcacgttcatatagatggccttgtgggatggctgtggctctgttccatgagctctttattccaggaccagggcttagggagcagcccctaacccaggcatgctgacctcatggcagaaccaggagatgtggcagttgtctttacccacattccattagccaaagcaggtcacatggccacacatgatttcagtagagtaggaattgggtacaagggagagaggctgtggggatgggcccaggggagagggacagccagcattttgaacaaatgatacagtctaccacagtgtaggtggaggagttggggaacagggaaaggtttcgcccactttaaaaaaactttctggctgggcgcagtggctcgtgcctgtaatcccagctctttggaaggcccggtgggaggatcacttgagcccaggagtttgagacaagcctgggcaacatggtgaaaccccatctttacaaaaaatacaaaaaatagccgggcctaatgtggcacgtgcctgtggtcccagctattcaggaggctgaggtgggagggtcacttgatcccgggagttggaaggtgcagtgagccgagatcgcactactgcactccagcctgggcgatagaggggagaccctgtctcaatcaatcaataaataaataaaaatttaaaaacagaaaagaaaaactttctgttttgtggatatgacatgattggatccacactattgctgtgtctgtgggaatatggggcactttattgaaatatgaatatttactgcatatttggttggttttataagacatgcatcatgttatttccctccattttcattaatgccattctcctccaatcaagatgagtttatctattttaaaaggccctgttggcagtaccaggtttctaaagcaagtcctgatacgttatatggagtttatgtatgtccggcagactctgaaactcaggcttacctccaaagcatgcagtgatatctttgagccttaggtcctagattgtcactctggtcctgatatgtctggcagtgtctgatagatgttgtccacaataagaattcaggcgagtttccatgaggttctgtagatgtttagctgtttgccagaaggagcatggctttcctgtttcttatctgtcttgtgcgagttccatgccatcttaaacagtgtgtaccatgtagttccctagaaccccatctataacttgaaccttagtctcttgagaatgacccaccagggtgattgtttagagccacgttcctacctgttgtttccggtgagcaaactggaaagtaaccctgcctggcatggggtgtctgctgtgtaaccctcaacacagtgacagtgatctgctctgaccgtccctgagcgtgctaggtagctcagggcttgcaagttcataaataattatctccacagcctattcttagtagcaacagatgctgagcttttccagcctgctctcggggtcagtggtgggaaagagaagaaaaaaaatgaaagcattgttttgcacatggctggacatctgtatttctgaattgccctgttgtgtgtatgatgcaactgctggagctgttttgctgaatgtgaactttgtcaaccgactggagtctaaattggttttggatccctctgaaatctaaatggtcagaccatatttttctaatattcagctggattgtatctttgctctgaagtggagctgacttcgtatgtgttcacagtggcagcaggggttgcttctctgttttcctggtctgtgttgtttgttttcccaagactgctgcttaccttgtccattgtctatactcaggagaccaggaaggtaactccctatggaactgtggccactgggacttcaaggatcgttaactctagtgttattgttaggaagagagcagactgtttttcagaaatgaaacaggtgaagcaccaagaatagctaacctactaggtgcactggtaccatggcaaagacttggacttggacttgggatatccaagcacttaggttctttgttgggagctttgacagtcaaggctgatgtttctgtttggtagctgtagtgcagaggttctcaacttcactatgtatcagaatcacctggggagcacttaacatattacttatattactcaggccagagtccaactccagaaattctgactccgttggtctggagtgggactttgcatctttagttttagaaagtttcccggctgggcacggtggctcacgcctgtaatcccagcactttgggagactgaggtgggcggatcacctgaggtcaggagttcaagaccagcctgatcaccatggacaaaccccatctctactaaaaatacaaaaaattagctaggagtggtggcacatgcctgtaatcccagctactcgggaggctgaggtaggagaatcgcttgaatctgggaggcggaggttgtggtgagctgagatcgcgccactgcactccaccctgggcaaaaagagcaaagctccgtctcaaaaaaaagtttcccaggagattctaatgtgcaactggagttgagaacctgtattttggaggcttacaaagcttttaataaaactgtgtggctgtgtctagatatccatgttaggttttgagtgaatttctgcatgaagaaaagacatctatttgggtggtgatgttgatggttggggcagtggatcctgtcttttataacaatatgattagtaataataatatgactaatatgattagtaatatgattagtaataatatgactaatatgattagtaatatgattagttataatatgattatattactaatcatattgttaataatactaactatcagttatggaatagttatattaggctctgggctaatctccatattagcactatatataaacactattattattctaaattttataaataaggaaactgaggtgtagtaacatcacgtgtaatttcctcacgatcacacagctgtctgactccaaagctcatcctattcatcactcctccaagatgattaatttccatttaaataaggaaaatgtggattaaagaatgagaagtctaaaaaggagaatcctctgagtgagaaccatatgcatctgtatgtgtcagggcatcattctcttctgataaaaggaaaaaaaagacaagtctggatgtgtttctttttttctcttaaatgcagtatttttttcctaagaacctgtgaaagttcaaggcaggcagtagaacccaagggcttgcatactggtattggaattaagcagtggcctctgagcttagctcatgcatgctcttcatgttcctcattagaagaatgaaaatagcttcttatgtgaatctatatggaggatgagtgtgtgcttacagttattttcttgtctaggctgggtaataattagagtgggcaatataaactccagtgttttcattttgttccctgaataggacaactgttttgttgttgcttttgttgttggcagatttgtaaatcagagtacatacttcttacttaaaggactgtgttaattctctaatgcctgttaaaagattagaatagtaccagcacctatcaataagcaggatcctggaaattccatagccagttcctgataggccccatacttatgaaggaatgttacattgaggcatccaataaatatttattaaatgagagagtgaatgaatttttgcacatatgtaccataacagaaatagcaccccacgtattgctaaggacttcttgggaaaggagagtgattttagtcaattgctatgctcccagtttctccacggggcccccgtggtctgctgaccaactcctaattgcctaccagaagcagttctctgtacactaaacatagcaatattagtaggcttttaaaaaatcttatcatcacaagcttccgtttatatctctcagccttgatgaaaggaagctgacttttgctttactctaagtagcattcttcatattacaagttagaaaaagttctgttgtccccagggcacataaggaacaggagagaagttgcttgccagcccatgtgaaagatgagaagcccaacttggattcattcatgtcccctgctacagggacacctggatgagaccctgctccctctgtgagttcaaactgctgtcactggagttataaagggacatttaggcttgtgttcttgggtctgtagccagacagcacaagtatttttagggctctttttgtctcaatctgatttctgcttgaaactttaacacatgcaggcttcactgaaatacttttaaactactctctgggcagtgtaggaggggttggattagtactacagcctttaaacagttcaaaaaaagatttttttttattgctaaatatccaacaggctgaacggaggaaattcaagtctaaccctggagggacccctgtttagtcatctgtctagacagacgagttcatataatgggcctctatgtttcttttgctttgtataacagacggtggtcccttcctttaaactttgtgaagatgtcaacctttggttttttttatcccaacctgctgttgataagccaagaaagtgactcacacatgagccaacaataactcttgagtgtgacaattagtcttacaattgagtagcaagaaaatataggatttgcatacaggggacctgggtaaaatcctgactgtgtaacatcgagaaagtcagttaccctttctgaacttttttttttttcctaaaatgagagttaattaaaaaaaaaaaacccaacattatttcttaatggttcttcaaaagaagaaattatctaacacagaaaaatgtttttcacatggtagaggctgagtaaattgtcattcattcaatcaatcattttaaggtgatcattgaagactttagcatttttgctttcttattctgaaaaccatagaaaaactagaaattctagcccatattttaaatctcatgtcagcatacattgagaacagcgagtgcttttttttcagtctagaaaagaagaaaagtggtaccaatttctgtgagaggaagataatattggagatagtattttaaaatacgggatattgagggaggagggagagcatcaggaggaatagctaatggatgctggccttaatacctaggtgatgggatgatctgtgcaacaaaccaccatggcacgtttacctatgtaacaaaccttcacatcctgcatatgtacccctgaacttaagaagttgaagaaaaaatatgggatatctataatttatattcataagttgaatgtatagaatcaaagggaggattggtggttgccaggggctgtagcgaaggggaaatgaggagttactaataaatgggcctaaagtttcagttgagcaagatgaataagatctagagagctgctgcacaacgtcgtacccacagtcaacaataatagattgcacacttaaaaatgtggtaagtgcgtacatctcccgttaagtgttcttacacaatagaatttaaaatattgttagaagtgaataaggcagaatgacattctttatcttgttaggagggctggaagctcagaccttgcatgaaaggacaatgtgtgttagtaatgatttctacaaccaggcggaacatcagccacctcaattccttgtcatttcactttaagctctgcctggatggttcctgaaaaccatgacctacaaaattttgttttattctatttaattcagttataattcaccaagcatatactgccttaagaatttggtgcctgaattatgcagatgaataaaaaatgagataggtagggatgagtccctcttggaagaggcatcaccaacagctcagagagtactaggaccatacaacctaggtttaagtggaggccttactgtttccagttccatagcaccgggcaagttccctctttaagcctcagtttcttatcccccacctaagtgggatgaatccagatgtgtacctgacagctgatgtgctcccagtagctagtaacattgcttttgctgttatgcttattctttttattgttattactatattatccctgccctcaagtagcttatagcctatttgtggagacccatttgtacacactaccctgcacaaagcagaaaaattaaaaaactgctgaatgacatttacaagcaaagttcaatccaaacacataggaagatggttggttaatgaaaccagctttgtttgttttgagacacggtcttgctctgttgcccaggctggagtgcagtggtgtaatgatagctcactgcagccttgacctcctgggctcaagtgactctcccacctcagcctaggaggttagctgggactacagatgatgccaccacacctggctaatttaaaaaaaaaaatttttatagagatgaggtctcactttgttgcccgggctggtctcagactcctgggctcaagggatcctcctaaagtgctgggattacaggcgtgagccactgtgcccagctgaaaccaacttttaggagaagcagtccctaccatgcctagaacaacgtgtatttcttaagtgcttagccacagccttaaagtgaaagggaaatagaaaaatcagcctcctctttagctggtacaggacagaagcaaaacatagatatctatgttgatagcataacttttcacattttgtagtatagttcatgacattctcagacactgaaattccattggaacccagtgctttacgtggctttgaatatggtatgtgtgagtcatgtctctttcaatacaactgcaatcaataaaaaccccagtaaaatgtggttaaccacaagggcatccctccccaccagctccacccccaaatcagcactatgattcattcaatgtagtcctcctccccctaatgtattttacattgggagatacttatgcttcctcagcacaaaaatcagaaatcctactcttctgctggtcgcctgcccctatgttgtgccgtcttgccccacccccgacccctgggaagtccagtcgtggcctataccctgggtagctgtggctggggagaaactctgcccagtttcatgcagaagcaggacagatgcttccaaaggatgcagtctgaggtcccagaagaccttactgagaaaaaagtcttttcttctttcttactaatataaccccagcatccatcttcctgtgtcttccttaaattgaatcctgagatgaggcttcccatttgccaccacctccttcgttttaattcattacatatattatagtgtgtttgtttgtttgtttgtttgtttgtttgtttttgatacagagccttgctctgtttcccaggctggagtgcagtggtgccatcttggctcactgcaaccgccgcctcccgggttcaagcaattctcctgccttagtctcctgagtagctgggattacaggcccctgtcactatgcctggctaattttggatttatttatttatttatttatttatttatttatttatttaagatggagtcttgctctgtcgcaccaggcactctatgagtgcaatggtgcgatcttagctcactgcaacctccgcctcccgggttcatgtgattctcctgcctcagcctctcgagtagttgggattacaggcgcccgccactgcgcccaggtaatttttgcatttttagtagagacggggtttcgccatgttggccaggctggtttcgaagtcctgacctcaggtgatccgcccgcctcggcctcccaaagtgctgggattacaggcgtgagctactgcacccggccattttttgggtatttttagtagagacgaggtttcaccatgttggccaggctagtctcgaacttctgacctcaagtgctcctcccccctcggcctcccaaagtgctgggattatagatgtgagccaccgtgcccagcctgttcattttgctgttgagacagagtctcactctgccacccagtctggggtgcagggaccatagctcactgcagcctggaactcctggccccaaaggatccttccgcctcaacctcctagagtgctgggatcacaggggtgctacaccacacccggcctgtttttttttttcttatacagaagggacctgaggaaacaatatgcattgtgagtgcacaccagagggatagagaaaggcagacaaggaaaggagaggaaaggcgggtaatggaagaagaggtgtggcaagggcagcagccttcacattgcttcctcgctgggtctgtggctattaccctcctgagcagcaccttctcaggccagctcggtctagaaagctgtctgccagcagattctagttgtcatcccagcagtccttaaaacatgacctgccacccacaagggaaatctggtctcattagtacctttaattataaaagcagaccgagaacacatggtaccttttctttctttctttcttttttttttttcttttttagagacggagtctcactctgtcacccaggctggagtgcagtggtgcgatctcggctcactgcaagctccgcctcccgggttcacgccattctcctgcctcagcctcctgagtagctgggactacaggcgcccgccaccacacctggctaatttttttgtatttttagtagagacagggtttcaccgtggttcgccaggatggcctcgatctcctgacctcatgatccacccgccttggcctcccaaagtgctgggattacaggcgtgagccaccgtgcccggccagtaccttttctttattttttaattttatttctttttctttctttctttctttcttttttttttttttacttctgcgagcctggaacatcttttctttaatttgatgctgtctttcttcctctctaatgctcaaatctagctttcatattttttctcaaggttgtcatttgacaggaggttttatttaaaagttctgaggttaaatacctggaagataagatgaagccagttgaaaacagtgtcctttttctgttctcatgcctgagagaagttcagtcagtcctgatttttcaatcggggtagaccaaagtttaagtcagctggctgtgatacaatcttattttaccattttctttcacatgcttttagttaatggaggaagctgggtcttaaaatatccaattgcatttaacttcttttacttacttaaggaaccagttaccctttgataagtacctatgtctagttccttttatccacagttggtatttagtcaataataacaataacaacaataataataccgatgcggtgcttcatatactccaggcactcttctaaacacttttagagacatcgatattcatttgatcctggcaataataggtattattactctctttgtttcacatgtgaggaaaccaaggcagagagagattaaataacttgcccaagctgtgagatagtagagctgagacatttacctatcaaagtcgctgccatcgtcagcactcactcgcattcattggaagctcaagtcggtgaccaatcatgtgtccctaaagcagcagtacagtgtaatgattaagggcacaaactctggaatgaaaatggcctaggtttgtgtgtttggggacggacattccactctagaagtagattccacctggcctaaaatgtgtaaatcactgtgctatcacaccaagttagaaactcacatggtgcacacacatgctaagctccttacagtctgaaactggcaacagtaatcagcatgcaaagttctctttagatggcctgttttttttttcctagctaacccctttgattagcaaatagtacaaatgtttatagagttggaagatttttaatatctttatttgaattgcacaaagcagccaaatgtagtttggccctaggctgcagagtatatgtgtccgggtgccaagaagcaactgcactccgcctgggatgccaagcattccagacctgttaccttgtaagtgtaatatttaccagatttttgcttcatctggagatgaagagcagagatgaatagagtgggggtgggtcaggctgctgggaagggagctcagtgttgagaggaatccctgaatgagtaggtagctgggaagggaacagagatttgccagaaaaagcccttttgctggcaacttggaatctaggaaaaaataacagaggctaacatgctggggtgcttaccatgtgccaggcatagtgccaaatgttctgctttcatgagcctatctcatcctttcaattctatgagatagatgctattattatccctactttgtagatgggaaaagtgcagctgagagagttaattacccaagatcaattctcttctgttccaaggtctctttgttactttagtaaaactagtacagagcaaggaatgacagtgcatcaagccgaaccccaacaagtcaaggcacttacagtatcttctgttggttcttactttctctaaccttcgcaactgccctgaaagttaggtgttgttaacattttacagacgaggaaactgaggccttagagcttaagatatttgccaaaggcacatttttgtttttgtttttgtttttttttttttttgagacagagtctcgctctgttgcccaggctggattgaagtggcacagtcttggctcactgcaagctccgcctcccgggttcacgccattctcctgcctcagcctcctgagtaggtgggactacaggcaaccgccaccaagcccagctaatttttgtatttttagtagagacggggtttcaccttgttagccaggatggtctggatctcctgacctcgtgatccacccgcctcggcctcccaaagtgctgggagtacaggtgtgagccacagcgcccgactgaaaggccagatttttaagtggtaaatccaggagtagaatctgggtctgctgaatcccacatcttaaatctctttgtgttcaaacatgacgtcttcattaggcaccagtgacaagatcacaaataaaacaaaactctatctctggacaagctcaattttctgcgatgttcctaaaagggaaggggattgaggcagagctccaggtagcttgtactgaatcctgtgtgtgaataaacagaggtagtagatgagatagtgctactaggtgtgtgtgtaggggtgtgtgtgtgtgtgtgcacacgcgcgtgcctatgcacacaatggggcagttgtaggctggagcagggaagatttatttttaaattgaagaaattagtagttgccagagaagcacatgtgcaatgtcttatgttttactttcatcatctctccatctgatgaataaattttaaggggattcctgcaggtcagcagaaagagagggtgaaatctagccctagttctttgctgcccttaccagatggaggccaccattaaagccctcaactcaactgaaaaaaaaaattttatgaagtatttttgtgaaaattaagctatagcattggaaaccactctttacatccccctccccacctcctgcagtgctcaaagctgtcttccaaggaagctggaaatataagtagaaaaaatatcttgcccagaggcccctggcaagagctcttaatcagctactggtacctttgcttttggggactgtagctttggttgagtctcacccaaaaatcaatgtttttagctgaaggcggaaaattataaaagcaaaggtgtgaagtgaagctctttggttagtgctgtcagtggaagaacagtcaccccagtggagtaataggtgccccaagacacatacacacgcttgagcaggaccactgattcatccaggcgctcgctgatgtgagactgataaagtgacttatttttaagcagttgatcatacttctgaattaaagtattcatagattattcagaaataataaatttgttttgtggaaagtgagatttttttttctctacttacttcacagtaccaccatgtcccactggacatttggacacataggaactgaattcaagggatgattttctatcacttgaaatcttaaagtagaagagagatggagtgatttgcttgtgatgaatcggccagtctctgggtaaaaaagtcaggactaggaaaacaaggactaaagtcacaaacttctgctcccaacacaatcactaagatcaccttcaaatgccacttctacttcccgtaggagttctagtctttcatgagtattcaattttaagcactggtggtctatatggaggtatgaggtggtgtttctcttttggctactcatctcaaattttgaaaataaatgttcatgggggtaagaagattgttttatgacactagcctactgtaaattctttttggagtcttcttgaaaatatttgagtttttaaattaaacactaggtgataaggaaaggtttcaagggaggataaagttaaaaagaaaggcaattcccaacgaagaggaaagaaacctatgtgatggagtcttaagcttttgtattctgcccttggatattacagcaaggccctaggactggatttatgatgcaaccaggggtttaattagaagactatgagctcgaatggagccacatttagacagaatctgaaacctctgttttgtcaatgcataattctacaggaatttgcaagtgacctttatttttttaggagggtccaaaattcaaagctggaaagcatgtgtcctttttaatgtatagtctattgcaaatatgaatctgcctttagaaaaacacaagaccattttaaaatgcaataatagggctgctaatttgcccttcagaagtcatttttcattttctttgttgggaaagcaggtgcatgagaagtgtgtgtatgtggggggtgtgggggagagggagagtgtcctcaggtgttcattgtcacacagccctcaagtggcttcacaggcagaaagtcctagcaagaaatggcagtccttgcagaagccctttgtcccttcagccatactgtttgtgagtttttttactgaaggattttcacacagctacgtggcgaaggacttgcgagatttgattatatatcccatgagtcaggtttcgatgggttacagattgcaataaaatcaaccacaggctttggaaaaactttccatgaaaggcattttagactaagaaatattggctttggatttccccatctagaaaggtagagagtaaacatgtactgacaaaaaagcaccacattcgggatcccgaaaataattgtgaaacaacacaagaatgcttttcctcctccctttccttcctttccacgtcacagagtttgtcatttatgacgattttgtggttgttttaacagttctgtgaaaatgagatacagagaaagtatttttaagatttatttaaataatataaggtcacagatattcccccctctcctcttctagaacatcttgattcattaaaaagaaaaaaaaaaaggaattaaatagcataagtattttgaatgcattggttatgggttttatttttaataactgtcttgtcactcattattttattgggttaaaagttataatcattttcaggtagataattaaagtagctatgtatgtaggaatggagttagaataatttggaatatcgtggtggaaaaagcgttagcaggtatgtgggatatttgaaagccttagaaaaacaagcatgttaaatgcttcctatactattatgtgttataagacagattatgtataataagaggctatcttaccttttaaaataaagtactaaaagtggttcattacaagtcacttccgctctggctgtaccacttattagctgtgtgaccttagataaattatttaatcctcataagccttagtctcctcatctgcaaaatggaaatgaaaacagtatctacctcgcagagttcttgtgaggcttaaacgagataatccaggtcagacccagctgctgttattcttggccctgtacatattgagagaggctggctttccaggcagtggatttaacatacgtttgcttcatctcatttttccttaaactcaggggctatggacagtccattcacacccctagagtctcaccagaaaaggacagaaggcagaattcaaatctgctgagaatggatggttaacatgaaacgtgggggatgactcatggcaggaggaggttcagtgaagcccgattgtctctgacagttgaggacaaagtggctgcagatgcttcagaggctgcccccagagcacattgcagcctgtgcagttattattcctaaggccgatgccacaatgatgtcacataaccaccaggcagatggctcgtattattatatgcattgaaaccagagtgaacccttcccatgtttgggatgggtgtggtgagtgggaggaacacctgttaggaggtaggatctgggtttgattctattttttccccctctcttactggtactttctggttggtagctctgagcctcagtttccttatctgcaaaagggagatgtacctcaaaagttgtttagaagggtagagtagaattagataagataatgtaagcaaatgcttggtatttctgaatgacctctggaatatgtggacagcatattgttattcaatgataattaagaataagttgaagtacagtgatgccaccttgtacttatcattttgcatttaacaaaaggacgtggacatgcattatcgtatttgagcttgacgaaagcctgtgatcaccggttcacagagcacagaggttttgggccttccccaaagtaacacgacttcagaggaaaatgagaattcctgctaagaagtggccatccttggtgtataagcccctttatccctttagccatgatatttgggagattttttgctgaagggttttaacatgaccccatgtcaagactaagaccaagatcttctcacatagctgcagaggatcacacacagagggtgtctttggctggtgaggggctcatgagatggagcatagcaggggcctcctagtgtgtccttcaaaaccaaaattaggcttttcataagctcagtctctgaactcagtgctgtctggctcctttcccatctttccccttggaggaaaactgaagaattaagctgttagaactagacttctctaataagcctcagtgtcacaggttgtcacagttgttgcattttattttgtttttatttttattttttcttaattgggcagcctctcccccagccttttcccccaaaccagaataagttcagagagactcccatggttgcattttaaaggtcatctagttctgtcattactccttgaatcctgtcataagatcctggctactcgcagggatgttgcttgaaccttttgtaggtaactctgtttgaaggctcttcactgtactgagcttgggctgttctgagatttatcacccccaccccatcctttaagtactacagaacaaatctttatcaggagaggtggggacacgggacagtggaaagagtgtggacttgggatcagatagacttgatttgcaaatttccagctacctttctgtttcagctgtatactgttgcacaagtgacttgcctgctggaaacctcagtctcttcattcacacaatgagaatggtggggattggaaattatctagccaacctagtaggcactatcaataagatagcatttatatgagattgccagatgtcattaaaaatgagattatgtcgaagaaagccctttgtaagttgttttcaaatgtaggcactgctcctagaaaatcactggaagtctctttgtgtagctgatttatcaagtaatctaatgggccaacaaaactaatgactccaagaatggctttctaagatgtgtcctactgaatcaggctcaagcctgcccacaggttcctgatgctaatagttacaaactgaggagtagaggcagaccccagggccattctggtttgtttgattctggatggcagagaaagggagggcttccatccacaagctttttgatactgctcctgtcttgagatttgtgaccttttctatgttcctgcctagaaaagtcttattgacatcagattctgaaagtaggtgcaccctttcctctttggctgtcaatgttctgttaataatataagcttacgtttactgagtacttactatgttcatatttattaccttatttaatccttatggcaattcttagaggcaaatgctagtattatcatattttaaagatacagaaataaagtgagtccctgctcttttgctgttcccgtctatcaaggtgaacacctaaagaggccactataatacacagtatgataagtgccaggatgcaaagaatggagaaattcattgtgctctggaagagccagagacacttctaaaaagaggtgacactaggctggaccttcaaggatgaatagaatttgccaaatgtaaaggtttctaggtgaaagactgacatggcatgggtgtggtggtgcttggcatatttggagattggaagtgatgtggtgcacttaggggctggggcagagtccagtatggcaggggtgggaggggagtggaggggagacagcagggtgcccattaagctggaaagggagtttggggtcagaaggtacaaaaattgacatgccgtggagttgtctctttgggatatctgaaatgtatcaagactgtgcacttgttagaggttaagagagagaaaaggatggttaagaattgaagtaggcttgcttggtaccatgctgtctatgttcctggaaaaggcatgcccagctacagagggtagtgctttctcaccttgaacccagtaacctcaagggcaggtagtgtctctcctagccttggatggaagagtctcatccaagcccaattattcttttagacacgagggaaccgaggcctgggaagttgatgataccctatatgagatctacagagaaatcagttgtaccactaccttctcttaatgctcactcctgaaaagcccctcccatattgcacatcttaaatcccttcacagctcaagtggttactgtacaaggcctgttcccacctgacctttttgtttcttctgcccaaggcagacttgtgagaaaaggtggtctgattgaaggctgggaaattaggattgatgactctatgttgcctggctatgagacttacaaaatccttttaggattctgggatccttctctgagatatttgaaagggttcaccatgccatgaagttcatgtctttttctatgtccccccacccccactggcattattctacatggaaatgactgtgatctggaaggcccatagacagcaagaacacatctgtgtcctctgcaagaatagaagctatagttaaaggacctgtgcacccacagaggaatggacgtggaattaggcatagtatataattagagtagagctatggagaaggcacattttggctcctagagctccccagcttccttctgacaataaaaaaggggtaatgtgcagttagttgttttcaataaaaggaagcaaagggatcaactggagtttttaaaactctgtctgtgtttaggctgcaccgattgcctgtccaaggcagtctgacctgcgtcaggccatcctgagggaagagaggtcacagttggcccccccacatccagagggaaattttaaagttcagtaaactactgggcaattatggattgcttggcacaccaaaaagtgattttgtctttgaagctgatgctcagacaacatctctgagtctccgctgtgcccactgaggtggacccgtggccccctcgcccaccatgaaagaaagagcaggctgttctgaagacatctttattcctgctgaaacatgggggacctggtcctttccttgcttgtccctctctggatcttatccctaggtcattcccaaagtaccatttccaaagaaggtcaccgtatgtcgggagccgctgaatagctgatccctgagttggctgcctgaacactaataactttctccatcctggtcccttccagacattgtacactctaaggctgctgtgcgtttagaggaagatacttccgctctcagcactagtaataactattcacaatcataatgaagagaaaaatcgctcttgtcagagtatcagtgccagttgaaaaggcagcttgtttgttttaatgttgctgtatctcttcaagttggaatatgatggcggtctcagaattggccttctcagctgaatgtgcttgccctttagaaggcactctatacagggttcgttattccactggctgcttgatatcctacaggggagcctattcttgagctcgatgtcagaagatgagcgttggattagcactgagaagtctgggggagtcacttacatcgaatcatttggcctctgaattgtggttttctcaacagtaaaatgggggtaatcctaacctggcttacagggttatcaggctaggatgaaatagtatatgtggaggtgcttggtgaaacactatgaagacctaaaggattgggattaacattcatcattgttatgtgacttagctgtttgagagcgattaatttccttttgctttgtgatacatgttgaacacctattgtgtactaagagaccttgtcctgggcctggagctaggacacaggagtgggaagatgacagattcagtatctgtgcttgtgaaacttacaaaggcaccctcgcccgatagagaggctgttcttcctgtaccggtcccatatgcacctgctttcaagtaaagcagacctctgcctagccttcagtgatctctaatccagtgctacagtcagacagcagcacagcttgcttccggctgaagaacattctcaagtgtttaagatcactgaaaagaattgagaggagttatcaattttccctgatcaaaacccctctggccaatgaatgtactcagatagtatctcatgggtgctctgtggtacagtgtatatgggtgcttatcaactattcaaggaacatacgttctttattggtaacctttcaggcactacacacatagaagctgaattaaggtattcagatgcaattgtagaagtcactattttttcacttttctgacacaaggaaatttttcagacatgtctaacctttaagagtagattagtgaaaccaatgtaatatgtgagaaataaacatcttcagtgacatcactgaggcaccctgacatacgagaagtgattccactgactttaggatatacttgagtacacataggtaagccccatgcaggctttgtgtaaaattcccatctctatatcttcatttgctatttgttaatttttgttatatatgtaccactccactatggtgctctatttactttcaccctcacacatttataaaccactggctttaatcaagaaacacttctttaaagaggacttagtaaatgcttttcaggaagcacagaacagccattgacttggaactaactaaaagcatttgtcgtgcccccaccccggtctacacaaccactagtgagaaaagaaagcaggaaagctttgggaaccacctgagttttttttgcacctccattgcaaagacttcttgaatgttcctaaagaaaacagagagagctatatgacagatcttaagcttccccaaagaaaaaaaaaaacagcttatttttttcttaagaattctccttccattctcaaaacgactgtgctttccaataagttgggacccgctggattaactccttggagaccctagctgccatttttcagtcagttttttctcccagtgtcccgagagcaggttaaaattcaaacattttatagcctctgtgcacaaaaataatgagattgaagctaaactataggggcttgctctcagctagttcaattgaattaaaataacacatacttaaacattttaaagtacttagccagggtctagttctgcaatggagattcttaatttaaaggctgtttttcttcctctcacaaacagtggcccaaccttgaagaacagaaagctgcttagcacccaaatgaacatgattccttaaaacaagcataacacccttggctccattccagatctcgttcatgccacagttcatctggattcctataattcctgtatgttcccatatcttaattgcccatagctgtgttgccagtacaaacaggatgagggaagagtgcacacccttaatgaatacatctaccaaccctaagaaagcaccatcatttgaaactctcaatattctttctggcactaaatggccatctactgaagtgctaatatggatatctggtaacttaacgtttcttccgagcaatgcttactccctactatctttatattctagatagagggctaccatttggcataaacaaaaattcagactttccattcagcttttcaaggaagtatattttgaaacgaattcctcagagtgctgattaatagaggatgggcattctgggctaaggtgggttccagaaccttcctgagttctgtcccactggccattttccttgatgatttgcagtaggacacagctggcctactggtcccccttgaagaagatgtgctgctgggcaaactggaagactcactgtggtggtagtgtgtgcctgtacaggtccagagcccctgcccgtagacttggctgtgtccctggagttgagcagcacagtgggaagtgcctagtacagaagaagcacctcagaaggaataagttctagtgtgaattcaggtccttttccacctaaacaaacttgaagacctttgttccttatctgtgagttttggggattgaatgaaataacatcaacgattcttcattttattacacaacactgtgccctgcagtatcatttaacaaatgaatgcacaggctcaccacatcagacttcaaatccttctcagcatatttaaaatgaggacttaaatcaaataagtataccctgaataggagtatattgtaaatattgcacagggtgtaagcgtaagatgatgacatctgcaaaactgtttgtgtggaaaagaccaaagacttgtaatttattagacattcagaatacaaagaatgtatgatgtgagtgcaaaggtcaaaaaatagaataattcattgttgggatgcattcataaaagcataagttccacataaggaaggggatagatagttctactctattctgccttgagaattatgttcagatgtaatggttcaggtttaagattggggcaaagtagagaacaactagaacaagtgaatggctttcatgacaaaatatgaaaggaaagatgggatgtttgcttacagaagaaaagagatgaagaagagaagatgcaaaaactggcttcaaaaactggcttgatcggccaggcacggtggctcacgcctgtaatcccagcactttgggaggccaaggtgggcggatcacaaggtcaagagatcgagaccatcctggccaatacgtgaaaccccatctctactaaaaaaataagaataaaatagccgggtatggtggcgggtgcctgcagtcccagctactcaggaggctgaggcaggagaatggtgtgaacccaggaggcggagcttgcagtgagccgagatcatgccactgcactccagcctggacgacagagcaagactccgtctcaaaacaaacaaacaaacaaacaaacaaaaaactggcttgatctaagtaggatcgagtggaaagggaatagatcatcttatgtggctgaactagacccacttatgtggtgtagctcttgtagaaagcagctgtcagcctgaggtagggaagaactcttgtactgttggaacaatggtcagaggctgaagtgggccacctgtctgggttctaagttctctgtcactgaagggttctgagagaaactgtcttgtcttgtcttgtaaagaaaattgcagtaagaagagtttgatgcttataagagagagcacctagtaggtgccaggcaacccctttgtgtgctatcatttctaatttcaataaagacttgcagagaaattgaacatcagctgtctttgctttttacttctctaaaactggataatccagaccatgtattcctcttcgtatttattcactctcaagccattaatttaatgtgctagtaataacagcccatgccacttggttaagttggtaaacagcttgcaatcctagcagggtgtgccccgccacttattagcttaagctttagggcagagcaacaaatcagcacagtgcctcaaagtaattaggcaattcccttacagaaaaattagcccacaagcaagaagcttacagaaaacacaaagaaaatctcacagtacaagacatgcattggccattacatgcatcactgctataattttgaaaagattagagaaagattttcggctaataatgacccgctacacccattaagcatgtcaaaagtccatactagtcattacagagctgcaggggaaagtgcattcgtttctggaaaggggaatgttggcgtttatttgttgtgggataagagtgctttctttgcagggatgagcaagaatgtccaatgctgagcaaggatgtccagggctgtgtggtttaagtcctattttgccaatgcttggtgtcatcctgcaaagattttacccttcagtttcttaatctgtaaaagagatcaaaataaaatgtgcttctaatctattaaaaggttaaggatgagatcctaaatttccaagtttaattcattaaaggaatcaacacaggccggcttccttctactgatcttgtttgaagcctttactgcattctagaatggtatatggttatctgtgtcatgggctcactggcctcattaaaagccatgaaagaaccaaaaagatgactattttgctccctggatatcacagcaaacaaaagcacagattgaagggaagtgagaaaaagaggagagaaagaaaatggagcaaaggaagtagaaaagataggaagggagagagaaaaagaaaaaaataaagttatctgctttaagggatgagattatggcagagaagagctgcttcagtggcctgttccagctgtgaggaccacctgccccgatgaggccattgggaagggacatatcacattcacggtttacctgcccacaaacgtgggtgcagccatactcttcatgctcatgggctctgagactcctctacgttaggcatcggcctcttttttttttttttttagacagagccttgctctgtcgcccaggctggagtccagtggcgcaatctcggctcactgcaagctccacctcccgggttaacgccattctcctgcctcagcctcccgagtagctgggattacaggtgcccaccaccatgcctggctaatttttttttgtatttttagtagagacggggtttcactgcgttagccaggatggtctcgatctcctgacctcgtgatccgcccgcctcggcctcccaaagtgcttggattataggcgtaagccaccgcacccggccggcattggcctcttaacatcaacagttggcctgccctttcagcacccaatgcttttactgctaacacccagtacaccctacacaaactgcctgcacaaccctgagcctgatgaggaatgtagaggaactgaagtgaaataggtgtctccgtgtaggtggggttttatgaggatgatggaaactttggaatagaaactggaaaccccatgtctgacacagttcaagaaaactaaacaccatgggccggcaccactgttattttactttttttttgcgcagtgtaagaaggagcccaaacactcatgctgacagtacgcacagtctcaaatagcagttagatgaaggccaagtcacgtaagctgatgccgacacaattagactcaccattgccaacagctcgtcaagtctgatatcatccccctctcggagactctgtctttacatagcagatgctctggtgctgtgttacatgtaataggtgggatggccggagagaaaatcagaaaccaccgctgatgcgctgtttatttcttagtcattttatgttaaattgctgtgacttgaacgtcagcagtgtttgggatgtggtagtgaaataaaatccatatccagtgtgccaagacaaatttcagaaaaccccaaaacacaattgtcttggtttcttgctggctgtgtctgtgcacacacaaatagtagctagtttattgccctccaaccactcggtgggttgcttgtcttgccacactctggggaatggctaatgaaccccaaactacttccttcaaagctggggatgtcaggaatgaggggccactacacattcattaagcatgtcagaagtccacaccagtcactgctgagctgcaggaaaagtgcagtcatttctggaaagggaaatgagggggtttgttctcttcattctgtgggcttgtgaataagagccaggggataccactgagaacagcagcactaggcaccaatgtatggggatctgaaagaccctgggcaatactggtattagtaaagtgcttctcactgggaaactttcacactgggtgagcccccaggtctccacatcaggtgcgttctcttagggagtatccgtgaaaatactatggccttgcattaaagtttttcaagctttacttcaaggtcaaacttatctctagtggaggaggagctgctgccttgttattttatttgtattttgttgccaccacgctccattgcatgtgttggtgtttctgcctggcgtggtagtcataccttcaactcaggactcctttgcacagaaggcaggatattatactgaaaagctttggattcaaaggctagcctcacttcgactttagcccaaagttattttactttcctcactcttgatttattttcttttctttttctttttttttttttttgttgagatggagtctcgctctgtcgcccaggctggagtgcagtggcgcaatctcggctcactgcaagctctgcctcctgggttcacaccattctcctgcctcagcctccagagtagctgggactacaggcgtctgccaccacacctggctaattttgttttgtatttttagtagagacgggatttcaccatgttagccaggatggtctcgatctcctgacctcgtgatccacccacctcggcctcccaaagtgctgggattacaggtgtgagccaccgcgccaggccttgatttctttatctgtgaaatggggattaaaaaatggcctttgcagtgatgaagttagtaaaggtattataaaatgagaaggggacataaaatagaattctgagcctgcagtgaaatcaggtcattctttttggagtaggaaaggtaggatggacatttttcattcctctctagctagttcatgacgctgagtaaccagaagggaagcctggtcaagtgcattgtggttagaccatcatagtctagggcagaagttctcaaacttgagtgtaaaaaagaattgcctactattcacccagtagatctaatatggaaccaagtaacaagcatattaataagcctatcaggtgattttgatgcagggggtgagtaaacaaatatctaactaacatagtggaatttagggaagaaaaacaatttttggaggctccatcggtggagagcatgatgtaatggcagaactggaagtgggctgccaggccatctagctcaccctgccaccatattcaggaagccccactgcatcttttgggacagactgcgccttgtgagtacacaggttcttccagggaggccagtgaggtgtgatctctcacaaccttgaaagagagtgagttgtttggtttcttttttttttttaatcttctaaatttttagaaaattatttttatattgagtcaaactgtggctccttggctatatagaaagtaagtccctgaaatctttgaaatcccttgagatttgatatccctaagtcttcccttcttcagtctgagtactaccagtttctttcagtgaggggtgctgatcctggctgtacatttaaaatcatctgaggaacttaaaactaagtccaccccagtcaattaactagacttttagggacttcaacccaggcatcaagattttcaagttcctccgttgattaaaatgtgcagtcaaggcagactactactgcaaatcatagaggaatcctatttttccagtttaagagctttagaactcttcctcttttctctgtcttactctttttttctaggtataaagcctgatccaaagtttaggtgcttgagccaggtgcagtggctcacgcctgtaatcccagcactttgggaggcggaggcagtggatcacctgaggtcaggagtttgagaccagcctggccaacatggtgaaatcccgtctctactaaaaatacaaaaaattagccaggcgtggtggcaggcgcctgtaatcccagctactcaggaggctgagacaggtgagttgcgtgaacccaagaggcggaggttgcagtgagctgagattgcgccattacactccagcctgggccacagagcaagactccatctaaaaaaaaaaaaaaaggccgggcgcggtggcttatgcctgtaatcccagcactttgggaggctaaggcaggcggatcacgaggtcaagagattgagaccatcctggctaacacggtgaaaccccgtctctactaaaaaatacaaaaaattagccgggcatggtggtgggtgcctgtagtcccagctactcgggaggctgaggcaggagaatggcgtgaacccgggaggctgagcttgcagtgagccgagatcgcgccactgcactccaacctgtgcaacagagcgagactccgtctcaaaaaaaaaaaaaaaaaaagtttaggtgctcctttgtctttctgtatttctttgtagatttcttttcttctgtcgtatatttcagcagttctgaaatgttagggtacataggaattgctcaaggagtttgctaaaatgcagaccaccatccatactctttaagaaagactgttatataggatccatatatccactgcaatgagcaggaacctgtgctgctttgtaagcctcgtttagctttgcctctaggagggggactagcttggacttgatgttgaggtaatcggtgagtacctcaggcaggaggataaacaaaacctccaggccactaccaattccgttcatacccacaccttctgtgtttcactttgaactactgacctttctggcttatcttggaaaatcccccacgaggacactgagaccagtgcttgtctgtccttgacaattgtggtcagtgctgactccaagaaagctgatattaaacactaaagcctccttcttcttttccccggactttatcaatctgcttttaattgttaactaggactggtttcaccagctaggagtcaaccagtatgtagtcacacattggttctcaaactttgatgaaatggtgccatcagactttcctggatgattcacatttatcacggattcctaggcaaggctgatgccgtgggctgggagcctcactttaagaaccactgctttagcaaatacagcaaatacctataggttcttgacccaagcatttcaacattcacgcactttcttcctgccagttttgtggtgtaaccaatctaagagggaataaacaatagatagatggctgaagcattgccctcctgaagggctgaaccctagacatcattgggggacttcttgcaagcctcaaatctacattctgtttcagagctcatcacatatgagtgacattgtaagacctttattcagttttgtttttttattaacctttaactttattttgaaattattttattttattttattttatttatttattttttattttattttttgagttggagtctttctccgtcaccaggctggagtgcagtggtgcaatctcggctcgctgcaacctctgcctcccgggttcaagcgattctcctatctcagcctcccgagtagctggggctatagacgcctgccaccacgcccagctaatttttgtatttttagtagagacggggtttcaccatgtggccaggatggtcttgatctcttgacctcgcgatctgcctgcctcagcctcccacagtggtgggattacaggcgtgagccactgtgcctggattattttaattttttttagagacaggtctcactctgttgcccaggcttcagtgcagtgactcagtcatggctcactgtagtctcaccctctcaggctcaagtgatcctcccacctcagcctcccaagtaggtgggagttacaggcacatgccacatcacccagctaattttttattttttaatagaaatggggtcttgtcttgctttgttgcccaggctggtctcaaactcctagccttaaccaatcctcccactttggcctcccagagtgctgggattttaggcatgagccactgtgccaggcctgaaacaattttagactcacaagaaattgcaaaaatagtacagagagttcctatatacccttcaacagcttctcctaatgatgatcacaactgtagtacgttttcaaaggggatggataacccatttaccatgatgtgattattaggcattgcatgcctgtatcgaagtatttcatgtatcacatgaatatatacacccttactaggtagccacaaaaattaaaaattaaaaaaaattagtacatataaaaaccgaagaaatccaagcctagttaatagtattgtaccaatgtcaattaaactttttaataaaaatagtcctaatatgaacattgtagtgaaaggtgaaattgcttgatgcagagctgtttagtggaaagttaggatttctcttgtcaccttttctgatggtcaggtttatagtaaaacaggtgaaatgttaaaggatagtggtggggagtctgtgagaactttggggactggaattgctccctactcagtggaaaggaattagagtatatagcgtcatgtataaactgccccaggacacttagctcctcctgttctttctctcctcttctaatttggtctgtcaggctatcagagcactgtctctcgggggcattcatgaaaggcccactgaccacctggcagttctgttacggtatgggaagggaggcagggaggaaactgtgtggaaatttgtgctagacccagcgctccaactttccatctgcttacttatagaatcctgacaatatgacccaatacatatgaggtagaaaattatttacttcattatatagatgaagaaacaggctcagaaaagccagataatatccctgttgccacaaaactaggaactggttgattcagttcaaccagttcattcttaactggattagaattcagatagccttgaaggtcctttagtacttaagaatcctataactatatgaggcttcggcagggctagctacaaaatttgcagaatcctttttcaatatgaaaatatggggtctcttgttcaaaaaaaaaaagaaaaggagtactattgaagatgctaaaatataaaactttttcctttgttccatggtctccctctctctgtctctctcgctctccaactgtcacggtgtttttttatgtgctgtttgatattgtgctcacttgggcatggggatgctcccagagtgacaggagactttcatggggacctgagacccttgccctaaaacttggaacatgtagtccagcagctgctggggtccccctgccacaagcccacaagattgataacacattgagccaggtatctcccttcccatgggactgccacttcaacccatagggttgcaaactctgcactgggatgtgcttggtacctggattaagagggtgcatgaaaatctcagaaatcacccattaaagaactcattcatgtcaccaaaaagcacctgtaccccaaaaagtattgaaaacattttaaaaaaaggagtgggtgagagacgtgcttctactgggttgctccctgaacatattgtggcactgccagcttgtggtggggacagctgccaccaggctttttcctgaaatggcatgggttgtgtgcctgaccccaactgtcattgggtggaggaaaacagtggccactgggcgggccagggaaggcagggtgagattggggacaccagaaggcaaggggtaggaggcagagagtcctgggcaagtggacaggtgacaggaggtgggatggcacagggctgaggtccccagccctctgtgcatgctccattgtcccataagacctcgcttacaaagcatcaattcaaaaataaaatgattgagaatttcaagatggtgactagagaggccacagagcactaaattcaggtatgagacctttctgaggatggagaccctgtgcccctgtgctggccacacgctcatgaagtggagaaaaactataaggaaagatttgtgagttcaaaatacttacatacaatacgttggtaaattttttggagcagatacaagtcaacatataatgttcatacagtagtatgtgattaagtgctgtatttaagctttttgtatactgttactttggaaattagtgactagttagattttctcaggttttttttctctcccttccgtccccaaaatatggttttgcaggcatgtgtggccaaggttgaggtgagggggacaccacttgatgacatactggaatcttctatgtgcaaaattttccccgggaggaaggcccatgagaaagcctgggaggaggaccagaatcagcctcctggtgtgaaatccaaagggttgaaggaaaatcgatttgattgaactgaaaaagtaggtcagaaattgagagaaggagcgggccaggatgtgagtgtggataagttggcaaaggtcaaacacaagtacctgaccacctggcaatggaataggaactgggatgcgcattacagaggactttagcgagaactcccattccaaagggggaaatgagttcttggaggaagcagaggaaaaagctccatccctccaagactaagcgggtggatcagagctgcacaagccattaagcccctaccccgggctccctcagtggagggcgggagcctgccgcgtcccgactgggcatcaaggggcctttttgggtctccctgctccgtgtatagggtgtttatgaagtaaaggcagggtcaaagactgtgctagagcaattgacagtaattttgttgtttccaaatgaggagacatttggccagttgctcatgttcctcagccagccagggggcttgtgacccagagcagatgacagcacaggacagctggcatcaacccctggaaggggtagttggttcttcagttgacagtttttaccacactctcgtatgctggagcaggagtacaggcagggaaggctaccggctcctcccggcctggtcgcttcaccatggttacaacaccaaagcagtggctgatgggggctgctcagcagtcctttcactgtgtgtgttagctacttctacttataaaacaaggaccaaaaatgcagatttgtgttattagacagttgaaatataaacagcctaaatgcttataagagccagaggggaggagggctgtttgccaatgtataggaagcccagctgaacaactgtacttaactagcaagctactcctgtaaatatttgcaaactccccttcaaagctcaaaagcctaggacaggatcattggatgatttgcttagaagaagaagaaacaaaattgacctcatggtctgaggcagccataaaaagaaaagagtgtggatgggcagaggaccagaaaaggggggaaaaaaatggtccaaagtttaataaacacaaaagagataaaaataaatctcaagagcacttatttacaaacttgatggaaggataagattgaggcaggcgtgtgtgaaagatgggtgtttgtgaaagtggaagaggcctgcagggattccactgaaagaggcggggaaaattgaatgagatgtttactcttcctaacgacaggaaacacgctaaattagcttctctattccaggatgctccttcaaaggatgtttgaagcttctgctgtctaatgcggaggctctgcgaagatgaatgcagcatcagcctgtggaaggttttggccaagacggtgtgcaatgccagaaagcctggccccagactggcctaggcttctctggttgtctggcctgttttcagctgagctggtcggcataggaccagctgttccaatcatgggggcgggcatattccagaggagaaaaagttctatttgttctcagcagctaccttgtcaaaatgctgtgtgctagggggctccaaaagcctttctgcgtgcaccagtgccccctggcctggaagccgcccatcaactaattcgcagtggtgatgcggcggatcatcaccatgtctgcatgaatactttttttctttgaaacctggatactttggattttttggggtttttttgtttgtttgtttgtttctgagacttctgactcctgggttataaagcctcaattcacacagtcattttctgaaccagtatggaggagactggtgtagaaattccccgcttctccgtgggcctgtgtgctgagagtcacacatatataggggaaggagatgggttgggagaaagttcctatgaaggaaaaaattcaggctcttaagatgagaaaatgttggtgtgttcctagcatctttttttcttcagtgtaatcgtcagggcatggatttcccaataaatcacggaaggtatttatttctattttaagatcggcaagatggctcatttatttaataagaagttagtgttgccaacagtcagatgcctgagtctttcaagagactcctgttgatgaccaactatgcaaacgggatatttggtgaaccctgtccagatacgtgggaaagaagaaagacctggcaaatacagtctctgccctcaagattcttaaaatttcacaggggaaacaaaataaacaaacataatgcagaagtaataaaaacatttataaagaaacatgaacaaccgtgaatgattatttgtaatgaagtcagataattgaagagtgggtagaaagaaatggagccactagagttggatgaaacactctggaaaggggaaagaaagtgtgtaggagattttggaagaagattgtagaaacatacctgtaacaagtggtctgcacagtgtagatgcttgataaatgaatattgtatttgaaagcatggagttagaataggacctgctctggtctttgtatagcctcagttgcatattcaaagacattggcagattacaaaaaaaaaaaaaaaaaaagccagcacaactctaaagcaacccaggagcttgattgattgattgactgattgatatttgagatggaacctcaccctattgcccaggctagagtatagtgttgtgatttcagctcactgcagcctccgcccccggggttcaagcaattctcctgcctcagtctccggagtagatgggattacaggtgcgcgccaccacgcctggctaatttttgtatttttagtagaaacagggttttgccatgttggccagggctggtctcaaactcctgaccttaagtggtctgcccacctcagcctcccaaagtgttgttggaattacaggcgtgacccactgtgcccgtccttcccagaagctttaaaatgtcatgtaccatcagcaactctgtattttacatggtttagaactgaaggaatttgtgccaattctttttcttcattagctaggatgacctcccgccaacagacattatcctgcataaagaattttaaaactggatctggtataagctagtacgtgggttatacttttgtttattcaaatttcctcatcataacttgactagagaatatgttaagtcatatgtgtgtgaaaaactaaaatattgaagccaaaagagattcgatatatgagcctggttaaaaaaagattatttggatgacaaactttcaaggaaaaaaaatacatgggcaaactgctggccattaggaactattttcttggcacatctgattaaagtgtatgcaggcctgacagctctctccaggcatgaactgtcataaacttgttccaattcaaaaccatctatgatttccaccagtctgtcagccttcaaaggatggggttaactgcatgctttcaaatggagttggaagtggtttgttaatctctattaatttgctactcctgtaactaaatgcacatgtttattttatttcttttttttctggttacattgttaatggtattaaactggccgttggaaactattctgtagatatttcccttatggtttcttgggattatctcacgctacagtcttctctgaaagcacaatggattttatcattttcaatgattgccctaattttttacagatgccatcccgcccactttctacagaccctacttcagaattgttcgatttgacgtctcagcaatggagaagaatgcttccaatttggtgaaagcagagttcagagtctttcgtttgcagaacccaaaagccagagtgcctgaacaacggattgagctatatcaggtaatgttcatttgttgttgttgttgttgttgttgttgttgttttagacagactctctctctctctctctgtcacaggctagagtacagtggcatgatcacagctcactgcaaccttgaactcctgggttcaaacgatccgcttgcctcagcctccctagtcaatgggactgcaggagtgcaccatcacacccgattatctttttaaaaaactttttttagatacgaggtctcaccgtgttgccctggctgatctggaactcctggccttaagcaatcttcccaccttggcctcaaaaagtttggggattacagacatgagccaccatacctggctcatttaggttgttgtaatgggcaatcagtttgaggtcttagagtaaaagaattctagtgtcttagattttcttagctgatataagccatgctatatattcacaatcgtgatataggccctcatttactattactgttctagtaatagcttgttcctaatcactcaggagggaagaaccctttagaatgcagtattgaagctctgagcacacttcctcagttgcatgaacagctggagtatgtactcttcagagggtttggttccagaagtcaacccgttaaactataaagtcagataatgtaggtccgatttcttcctggggaacagtcagttgaccttcctttattcatcctatagctgtttctttctccttttctatgattttctctttgttttcttattgtcttctctcttcctttttcacttttttctcctctctttgcaacctccttctctttattaactttatcccgtttccttttcctttctaattctacccactgtctccagtctacccactcaatacacacacacacacacacacacactttcctccattatttggacagccctgatgtctcctgttctcatctttgtagtggagttggagttggtgggcagctgcgtcaaaatgtaatgatgatgatgatgaaatgccaacttgctgagattttcagagatgttcttaaaagcttgttacccgagtgtagtctacagggcatttgcatcggcatcacctggggctgtgagaaatgtagaatctcaggccccaccctagactttacagaatcagaatccccattttaacaagatccgcaggtgcttcttgtgcacattaaagaaccacttgaaaaatcctgagtctggtgcagccttgtaaacaggcaacttaaatacatcctgatgccatatgaatagtggtacttgcatatagggtataggcggggaaatttcaccagggagctgacattttgatgaggccttgagacgtatctattaaaacctgatgggggatcatcattcttggcaggaagggcaggcactgcaaagacagtcttgaatgggcttgctgagggtacctgatgcatagcgctcagtgcctggaggtgaggagagactggggagaaggtggccctccaaagatagtgtgtagagtgacactacagaggattaagaaaaaaccccttgggatccccgtgataaggggtatatatgtgtgacaatatgattaaaacatgggattacttgagaaaaagaaattggcatctatgtgcagaaaccgctagtttttctggactctaatcatttggaatttgtgataattaggatcaaaattttctttgtattcattatgaaaatagagaactaccacacaaatgaatatgagacctgaagaatagtttaaaatacttaaagcagtcattttgttttctttttctgtttttttgagacagcatcttgctctgtcacccaggctagaatgcagtggtgcagtcatagctcactgcaccctcaacttccagggctcaagcgatcctacaggtgtgcatccccacgcctaactctaatgtatttttctgtttaatttttagtacagatgagttctcgctttgttgccaaggctggtctcttaattcttgagctcaagagatcatcccacctctgcttcccaatgtgctgggattacaggcatgaggcactgtgcctggccccagttttaaagtactagttcacatgtgtgttcatgaagaataattcttacttatttaaataggccctcgagaacctgtttttgagacttttaaatcctaactggcattctgggtagcaccaatgggccagccgttgctcgtcgccccaaggtcagagagcatgcttgtgtgaccagacactatgctgagcaaagactcagaagtattgtttccaatgatactcacagctatactatgaagtttgtacaatgaagtattctttctgctattatattcttttccatttcacagagaatggtgctaaatcccagagaaattaagtaacttggccagggtcacacaggtgggaaatggcagggctgggatacaaatccacctcggactcccaagtccctcctgcccctcaccacatactatgctattcctagcaaaattttccctttctcttacccttgggatcagccagaatagaagaataataagacaaactaggctagaggatgaagtaatatttggaggggaagcaaaaactggttcctatgaaaaaaagccagattaagggtagccagataaattacaagatgatttaaacaaacaaacaaaaaacatgattatatctcctttttcttctcttttttaccaattaaatcacccttaaatttccttctttgctgacgatagcatcataggttgctctctttggccctactttagttacatggcttcagtaaattggaggcagggtcacctaggtcctgttacctgtaatggaagctgctaagtccctatttttctgtggccccttgaccctgtcctctgaggagtagcctctgccagcaggcttgccaatggcttttttcctcccagggcccatcccatctccaggaaagggtgtttctcttgaggctggcaacttagaggaccttagtgagttcttggtagatgtgcctcagaggtttctgaagcaccggctgctccatgacgcaagtgacatgatgtgcatggcttagagtcccacgcttgaaagaggaacggcccaagatggaagcttttagtttggagaagcatgggcacgttcactgtcactatacacgggcatctggaagaagaagattctagcagaaaaatataaaataatagcaatttttttatctttctggggctcagctatacaactcctgaagcacagacaaggtccagagagcaagtcaaagagatccttgaacacccgaagagaagacaactcacacacacttttgatggatcagaaaggcagcctcttgtcttttattgcttcaactagtttgactatctgtagggccagaagaaattagaagcactgaattaaaagaggagggctagaggaggacaccgtgacatcaacagcaggtcctttagaccagcagtccccagcctttttggcaccagggaccagttttgtggaatacaatttttccacagagcattacttttattgtgcactttatttcattgtaatatataatgaaataattatacaactcaccataatatagaatcagtgggagcgctgagcttgttttcctgcaactatatatggtcccatctggcagtgatgggagacagtgtccgatcatcaggcatttgattatcataaggagcgtgcaacctagatccctagcacgtgcagttcacaatagggttcttgctcctttgagaatctaatgccgccgctaatctgacaggaggtggagctcaggcagtactgcaagcaatggggagtggctgtaaacacagatgaagctttgcttgcttgcctgctgctcacctcctgctgtgcggcccggctcctgatgggccatggacctgtaccgtccaggttggggacttctgctttagactaaagatttttaccactgtatcacagtaacgctatctcagataatcagaccacagaagcaatgcctgttgtggacaagttttctgaatcttaccctgtttatagttaacccactctttatctctttggcttcctgtctggcttctgacttttgcttctggcctctttatttggagtcctatttttagtatggtgttctccaactttccttttgtctccggctgccatttggaggtctttgtagtctttggtaataaactcccatctctagtcctattacaggaattgatgccgatggtaataaccttgaattatgaagatgaggctaaattatagtcaggaaactgaacacatgcaataaattttacagagtttcacatccaaaattgctgaaatattattttggaaaaaaaaaacagatttgatgcttaaatgggcagatcttcagctatttggaaagctcagctcttcagaagaacaaaacctttgaagttcttggataccctttgattactgtactacttgacacacaattggcatcctaatccctagaggaaaacagggtgactatgaaaaggttctcaggtcgtttacatggttgtttggattatttattaggactcttcaggacactgatgttcagtaggaggagagtatgtatgtgtgtacatgtgtgcacacgtgcctgtgaacttacatgtgagcataggcactccaccaggtttggaatccctgggggagcttttacgaagactaaccacagtttccttcaaggggattctgattttccctggaaaggaaaatgagagttgcctcggcacagatgttggtttcaaagagctctcctggtgactcacatgtgtgattgttcagatttggatcttccaattggaattcgcagatttaaaatatagcccaagagttttgagtcattctgtctcataaaaatgccgccaggtattctttttagagtcacaatatgaggctggatggacgtaggataacaattctatacatgagttcagggtttgtcttgtccagagctgcgaaggtctattgtttctctccacctgggatagttaggaaacccatgcttctgttgaagtcactctgagcttgtttaaacctgaaagcttgtgaacttacgattttcattaccctcccctctctacagaacagtgtgtcagaatattaatgaatgataggaaaataaaatctttctttcctgctttctctaacctctttcacgttaacaaactctaaatagcatctactggtgtgatcaagataggcttcccatgtataccaataatggagggaatatgagagggataaagtgtctgaaagatgaagggaaagaggagaaaacaaagatgaaaaacaactgtttttagatagtaacgatctttgccatatttttaaagctttatgccaaaggcagcctttattgcgatatgttcagacaaaactccagtgctctaggaatgcattcaaacccatgatagttgttatagctctcagcccatttgtaaatttgaacacacctttctttgattaagtttcccctgtatgtatgattaaaatcatgaccagaagtatgaggtagagggaaagaaaataggaaggagaattctcttcaagttgaacatcttctatatgggcaagaacacctgctgtcttggagttggataaatccccattttacacatgaagaaatgcttggggaacttaatgacatatctaagggtacccataacttcatggccctaaacaatcctttgggaccaccaaagaatacttatatttaaatttgctaacctcagaggacttggagctctccagtatttctagtttcttctcaccaactcacaccctttcaatagtcatttctcatttaaaaccttaccacctccagaatagtatgattcataccactgtctgggttatctatttgctgcacaacaagcttcaaaatgttgtggcctcaaataataatcattttgttatacttcacaagtttttgtgggtcagaaatttcatcagagcttggctggatattgtcttgctccatgtggctttggctggggtcacttggtagcatttagatgacagttgggctggtctggaggattgatgatggctttgtgcctatgcttggaacttcagtagaatgactggaaggccgggctcagctgggctcctccccctagatagtctcagatgtctccatgtggtgttcccagaagagtagtcttgtttcttacatggggactcaggtgtgcaaatgtctaaggtagaaactgcaagtcctcttaaaaacagcccagaggctgggcatggtggcttacgcatgtaatcccagcactttgagaggctgaggcaggtggatctcttgagcccaggagttcaagcctgggcaacatggtgaaataccatctctactaaaaatacaaaaattacccaggcacagtggcacacacctgtaatcccagctactcaggaggctgaggcaggagaatcgcttgaacccgggaggtggaggttgcagtgagcagagattgcaccactgcactccagcctgggcgacagagccaaattcagtctcaaaaaaaaaaaaaaaaaatagcaggcccagaaatgacacagcatcacttttgccttactctattaatcaaatgaactacagggcagcccagattcaaagggaaaggaaatagatcccatatatcaatgggaaatgtgtcaaagaagttgcagccatctttaatcttggaacactaacccactgtgtaaagtaaagtaatagtcagccgactgtgagtgtgcacctcctggcatcagcatcatacctggtgccagccatctggagataaattagcctccaccttctggttactcagggtcttgtgaagaaatgtacatataagtgatatctgtctatgaataaacatatacccaagatactcttagagcaaaagctggagaattcagagaaatgcctcagaactcattcttgccagaaagggagttgtgagaatttgcaggcaacttgccatcttggttgggctcctttcgtgggcagacatgtaattccaaggaactgagccatatgcctgaatcaagagattcctttgaacccaacaatatttgttgcagagatatctgaatagattagattgaaacaggagtgggtttggttaattggtatgcatagtattacgtcagaacgaccttcctcgtgtttcagtgtgcgtactcacatcccaggatttggtgactacgtctgtcctccccgtttaccttattgaggcagcatggcatagtatgcaatggtatgggcgttgtgacctaagctttcttagtaattcccaattagcttggggtttattatgagggtgaaatgaaataatgtctatgacggccaggtggggagtgcgtgttcaacatgtgttagttcccttcctttgctgtcactgcttagattttgacttctatgtctttgattcctccagtgggaagagctctctcctaagttacctgtgaaagtcagttgccaggttgtttttaagactgatttattagcttcagagcactgaataaagtcatacaaaaataactccctgggggaagcagagtgatgtattaggttcatacatcttacaatatcaggagaaaaagccactaaaatattgccttttcccatggggctgatagtctcaggtgtctccatgtggtcttcccagaacagtaatctgacttcttagatggagattcaagtgtgcaaatgtccaaggcagaagctgcaagtcctcttaaaaactaggcccagaggctgggcgcggtggctcacacctataatcccagcactttgggaggctgaggcaggtggattgcttgagcccaggagttcaagaccagcctgggcaacatggtgaaaatccatctctactaaaaaatacaaaaattagctgggcgcggtggcacatgcctgtaaacccagctactctggaggctgaggcaggagaatcacttgaacccgagaggcagaggttgcagtgagccgagatcacacaatctctgcctcccgggttgcgtcactgttggcgctggtagaatatcatctgccaatgggttcctgttaatcagtagaagagaaatgtgctgaggtgaatttaaaggggaccttagatttcttgactgtggcctgagaaggcatcggcgctgtgcatttctacagagaggcagggcatccagcttcagctgaagccaccgctagcatggcaaagggacccctctctctacagaaaactgtcaagactttggcaagtgaaagtacagatggtcccctatttaagattttttcaactttgtgatggtgtaaaagtgactcaacttacttttgttcatacgtatgatatcaggacacaatcccgttgtaagtcgaggagcatctgtaaaataaaatctgccccccatttgctctgacctctttccttcggattttaatgtctcattgcatttgcatttaaacagtaaccagcttgtcaaatgtgatgaaatgtcatttctagaggctatcggttgcaaggatataaaacagtggtgaaatcctaagtcatttacatccatttagttttgtatagtaaatattaactgatttttcagacttgaggatgatagggtgaattgatgtttatggagcaaaataagtaagggaagatggtagtggggggagtgaatcatcagctacctttactggacattgcatatgtaacatctctgcaacagattttaaaatgcacgttcttaaggtttcatagtgaaagttcagggtagatggcctaggcctaccttttaagggattctgatgctgcaaaattgaaaggtggggtttttgtcataccagggagcacagcactaatggggttaatgaaaattgcctctttttcctaaccctaaacacatgtgcacacacacacacacacacacacacacgcacacacggttcagctttcatttctcatattgcccaagagggtgtaaaataaaaagaggtcagccaaaaaactgtctgttaaattagacttgcaaaaatgctactgacaaacaaacaaacaaacaaaaagtcatactgtgctcctgttgtacataattttacagcatacaatcttcttaatactgatcctagccccggcgccacattggagacatacatagcatagtaacccacctaaaaaaagaataaaaaacaccatgaggtataataaacactttgtttgcacaaggctattaatatctcagggttttttttcaaactgatcaaatggcgtgcttgcctcataaggaaactggattgttaccatttgcattaggttataacattagtcagcagacaagaccccccaaaaagtagaatgaacagcagaccttctccactgtattcaaataaatgttagtgaatatgcaatagtaactaataatcttattcttttttcataatgtgactcagtaacaatattgataattatcgctaatacatgcagtgattactgtgtgctaaggtaggtactggtctcatccttattttacaagtgaggaaactaggatacagtgaagttcagtagcttgcccaggccaggcaggtaggaagaagcagagccaggatttgaacccaggcggtctgaccccagggatcatgctcttgaccatgattccatactagcagaaagaacacagattttggagttgatcagggtgggtgcaaggcatagctttggtcctttggggagtctgaggaagtcatgtcactaacactatttccacaccagtaaaatgcagatgaaagcacctacttggcaaagattttataaggcatagagataatgcatggaaacttctagcacagtatctgtatcctcagcggttactattattatcattacagtttccgagcattgagtttgaactgttgtaagaaacagtgtgaaatttatgatctgctcagaatctgttaaaaatgaatgcttcccctagcccttcttgctgtagggtctgggttcttggttgctgtcccaggagtttgcttcagggtctccttcaagaatattttccactcactcagcttgtggtggttcattaagttgcagatgagcaggccgggcgcggtggctcatgcctgtaattccagcactttgggaggccgaggtgggtggaacacttgaggtcaggagtttgagaccagcctggctaacatggtgaaaccccatttctactataaatataaaaattagccaggcgtggtggcgggcgcctgtaatcccagctactcaggaggctgaggcaggagaatcacttgaacctggtaggcggaatttgcagtgagcccagactgtgtcactgcactccagcctgggcgacagagcgagactctgtctcaaaagaaaaaaaaaaaaaaaaaaaaaaaaagttgcagatgagcatatcagagtgggaaaggaggagacctttgcagccagtcagccctttctctgaacctcagtttttcatctgaaactggagataacatttcttgcctaatgagttcctgtgaggagaatgcctaggttaagtgtctggcacacaagatgcggaaggagtaggttactgtcaggatttttcttgtcatcttgaacatggttcatatttcccctaaggttggcttgtgattctaaaaccactcaacagtggtgtcagtcatctctgcttggatgtggtctgatctgttttctgttaacagtgggacagagcagggttttggggaacagccattgttttatcactgtgtacatttgctttatcaagatgttaagggctgcagtgctgaactgggggctgtgctctgtcttgcttctctttttgaagagtgattacaatgactgactccaataggggtgtctttttatctcatctcctgtcttgttactacctctccctgctccaccaccacacaaataggtttgatatatgcttcccaattgatttttaataaggttccttttttttttcatgttgtaaatgttcagtatgccaactatcctgtaacctcctttagggcaaaagctgtttcaagggagcatgcatgttttttttctcaatgccaacagtactcaggatattttttggaaccccgttctagaactgtggcagagtccagcatacatacttgagaattccccaaaggagacaaatctggatttgcgaaaggtagtgttgatttttgaagactgccaaagttctatggaagaggaaaatgataagtcattcagctgattttactggttcttatatttctgaaagtcagccacctcccatgtctctgctgttactatgcttgtccaagcagttcttgtccctcacctgggccatggcagtggcctcctggttggtccccctgtttccaccctggccccttgatatggtttggctgtgtctccactcaatctcatcttgaattcaaatgtgttgtgggagggactgggtgggaggtaattgaatcatgggagcaagtctttcccatgctgctcttgtgatagtgaataagtctcatgagatctgatggttttaaatagaggtggtcccccgcacaagctctctttctcttctcttgtctgccaccatgtgagatgtgcctttcaccttctgccatgactgtgaggcctccctagccacatggaactgtaagtccaataaacccttttctcttataaattgcccagtcttgcagcagtgcgaaaatggactaatacagtgaattggtatcagtagagtggggtgctgctgaaaagatacccaaaatgtggaagcaactttggaactgggtaacgagcagaggttaaaacagtttggagggctcagaagaagtcaggaaaatgtgggaaagtttggaacttcctagagacctgttgaatggctttgacaaaaatgctgatggtgatatgaacaataaggtctaggctgaggtggtctcagatggagatcaggaacttgttgggaactggagcaaaggtgactctacgctttgttttagcagagacagatggcattttgcccctaccctagagatttgtggaactttgaacttgagacagatgatttagggtatctggtgaaagaaacttctaagcagcaaagcattcaagaggtgacttgggtgctgttaaaggcattcagttttaaaagggaaacagaaaataaaagtttggaaaatttgcagcctgacaatgtaatagaaaagaaaatctcattttctgaggtgaaattgaagctggatgcaaaaatttgcttaagtaatgaggagccaaatgttaatccccaagacaatgggaaaaatgtctccagagcatgccagaggtcttcatggcagcccctcccatcataggcctaaaggcctaagaggaaaatgtggttttgtgggcctggcccagggtccctgtgctgtgtgcaggctagggatttggtgccctgcatcccagccactccagctgtggctgaaaagggccaacatagagcttgggccatggcttcagagggtgcaagccccaagccttggcagcttctacatggtgttgagcctgtgagtgcacagaagtaaagaactggggtttggaaacctctgcctagatttcagaagatgtgtggaaatgcctggatgcccaggcagaagtttgctgtaggggcagggtcctcatggagaacctctgctagggcagtgcagaagcgaaatatggagttggagcccccacacagagtttctactggggcaccacctagtggagctgtgaaaagagggccaccatcttccagaccccagaatggtagatccaccaacagcttgcaccgtatgcctggaaaaatcacaagacactcaacactagcccataaaagcagccaagaggggggctataccttgcaaagccatgggggcagagctgcccaaggccatgggagcccacttcttgcatcagcgtgacctggacttgagacgtggagtctaaggagatcattttggagctttaagattttactgccctgctggatttcagactttcatggggcctacagcccctttgttttgaccaatttctcccatttggaatgactatatttacccaatgcctgtacccccgttgtatctaggaagtaactaacttgcttttgattttataggctcataggcagaagggacttgccttgtctcagatgagactttgtactgtggacttttgagttaatgctgaaatgagttaagactttggggagctgttgagaaggcatgattggttttgaaatgtgaggacatgagatttgggaggggctggggcagaatggtatggtttggctgtgtccccacccagatctcatcttgaatttccatgtgttgtgggagggacctagtgggaggtaattgaatcatgggggcaagtctttcccatgctgttctcgtaatcgtgaataagtctcatgatatcatgataagtctcatgatatgatggttttaaaaagaggcattctgctacacaagctctctctctttgtctgctgccatgcacttaagatgtgactttctcctccttgccttccatcatgattgtgaggcctcctcagccaagtggaactgtaagtccaataaacctttttattttgtaaattgctcagtctcagctatgtctttatcagcagcatgaaaatggactaatacaccccctcagcagctgtttacagcatagcaatcaaagtgattcctgataaaatattggtcagatcaaagtcttctctttaaagctctacagtggcttcgtatctcaccctgagtagaagccaagtccttaccatgacttaggaggctggctctgacctgttccttagtcacccacccctcagccataatttccccctcattcatagggctcccccatttgtcaatgacctctttgctcttcctcagacactgcactcactccttcctgtggcttgtggccactgttccctccacccacagtgcttttcccaactacccatatggttggttctctttatttctttaggtctttccttagagaccacctgctcagggagaccttctttggccaccgtacctaagatctcagagtcgcttttcccaacacatcctagccccaatgtctactgtgcttttctccttgataatcttcattatctgccatatttgatctattccatctttatgttgtttataatcttatctctacctctagccataaactactggagatgtgtctggtccacagtgggtgttcaataagtgttttttaatgaatttaactaaaatgtcaaaataagattcaactataaggaatgtccttcaaataagtatgtaacttataaaggggattctgttgagaaacatcactcatttattcggatttggaaattctgctccatttgttttaaagatatctaaatattgatgaagaaagaaatgtatataactatgcatcttctgtgacttattcagagctaattctgatgaagtatttaatattaatagataataaccatgtaggtaaaaaaataaaataaaattatgtaataaattaatgaaactgatattcttgggtaccccataaacttgatgttttcagaaaaaacaagctctttatttatttatttgggcttgttagtttatagtcacatgccctaaattaaagtgctcacttaaattatagtacaggccacatatgttataggtgccaggaggtaggaatcaagttagaagtctactccccaagttcacatgtgttagtgttaaagtcagagtggaattggaagggggaggtcaaataaaaaattagaagatatggctccagagagcttgaggtcttgtggacagtctttccctcaatggcaggaaataggtaggtcattgtcaaaatttatactgctgggctgtgtggtacagcctcaaagactgtaggaattcagctaagaaaaagacagtacagtcttgatttaattctccttcaaattctaccattacgtattgtactgcacccctctctcgcctggtctatactgatgtggctttagtccagttgaatccttttctcttttgtgtgatttatacctgatggtctcatgaatgctactgagctgcagcatctgacagactttctgttcacacaaaggactccttcatcccttcaacctggagaaatggatttacttgtttatgcacatgtgcattcagcacaaaggttcatctgtaaagtttttttttttaatgaaggaaacaatagggaattataaggtatttcatcacagaggagagacttttctgtgtgtgtgtgcatgtgtgttgtgtgcgtgtatgtgtgtatgtgtgtaacttgaaggcacatctagtgacatttccataaaggtcatcaaaggtctgcgtatgccatactgtatcataatttcacatgggtatgtataatacaggtgtatatcaatgtgtaatactctgtactgtaaagcgaaagagttcacgtagtgatgtaataatgtagctatctgagctccaaagagacttgtattctcagtcttctgaggctgatatgtattccacgggagctgactgaaggccctcgtgaagctcttgccaggtatacattacttacgacctcttagacagatgcaattataaaggagccatgacaattacaggacatggtgatggcagaagcaaggtaagtactgggtgtgttaagccacttctgaaggataatcatgcagtgtgtcggtgtggtaggcacccccaaagtgacccagcataatcaaggaggctacagttagacaggaagagagagctccatttgtgcctccttgaaataaaagccactgtacccagttctgattctctataaagctccactggctattatttggaaattctctttcttgctttctctccctcatttcatttttataatgaaataaatagaaagggtaaaatacagtattaaattgcttattctgtctgataattctttctgtccttcttgatatatataatctctgtggtgggtttctggatgtgtttaaaattccaagaagcagtttttttttttttttatcactataaaagaccgattgttcaggggcttatttgtcacttgatcaaatgtgtctttctaatgaagtctgttaactaataagaatataccaagcagggattgggtaagctgccatgaaaaatactctgtgggggtaataagagagagaaagaacattttttgctttgaaggagctcatagttagattgagcattatactccccacagtataatttatgaatcactactgttagaagtgggattgtgtcccttcccctacacataaaaaaaagatatgttgaagtcataatccccagtactttggaatgtgatctgatttgaaaataggctcattgcagatataattagttgagatgaggtcatcctgcaggagggtgggtccctaatccagtatgactggtgtccttataaaaagacagccatgtgaagactcagtcacagggagcctgccatgtgaagatgaaggcagaaattgaagctatgcaactatagccaaggaacaccaaaaattgccagcaaaccaccagatgctagaagaggcaaagaaggatcctccctggaggcgtcagagagatcatggcccagccaacaccgtgatttcagacttctagcccccagatttgtgacaggataagttagtgttataagtcacccagtttgtggtactttgttactacagttctaggttacccatacacctatcaagccaactctccctaaatcctagtatatattgttagaaaagataaaagggcactgaagagagaggaggatgccttccttccttccttctttctttctttcttcttgttttttttgtttttttgttttctttttttttgtttttgacagagtctcgctctgtcacccaggctggaatgcagtggtacaatcttggctcgctgcagcctcaacctcccaggctcaacagatcctcctgccccagccttttgagtaactgggactacagatgtgcaccaccatgtccagctaatttttaaaaatgttttcatagaggtgaggtctcattatgttgctcagactggtctcaaacttctgggctcaaacgatccttccatctcagcgtcccatagtgctgagattacaggcgtgaggcaccacgcctggccttgttctcccttctaatgaaccagcacatccctattacctggactgtgttctcttagtgctggttttttggatgttcatagtcatccttttacactctcctctctacaggaaatcttccctgacctcatctacctggcaaggatagatgccctgcctgtaacatttcctggtaacctatgaacacatcgttttaagtttttgttgagatgtctatattcccttactacccaatgcactcctttaagaacaggcaccatcttattatcctggggtatacgtataatgcaatgctttgcttacagccagtgcttaatatttgttgaactaaactggaggaagtgaggtataaaataaaatcaaacaaatgaataaatgaggactcaagtgcatacaagatgctcggcaatgaatgaatgactgaacaaacaaattaactgatcatattaaatatttgaatattattagttattattattactttgaatgagggtaaaaggctcctccaaagccaatgaaagccttccagagtatggatgtgggagtgatgtgttggagaatcatttgttcctgctgtaggtaagccaagaaatgctcacaagagtgtgttctctgtgcctgtctgcctgagagaaaatcttggtctttaataacacggttttgacctagagagtcagatttctccaaaattaatcaatgaatatgtattctaccagtgtcagcaaaccaaaatataagggtttgtggggatttaaataagtttatgtttccctctctcttgtatgggcttaatattctattggaggaaatggacatttccacacatccaggattacccttgaagccactatgcgcaagggaccacatgctcagcaaatcccgtagcattgcatggggaactagggaaagggacctgactttagtttagagtgaaagtaagcatgtcattgaaaaactgggcttcaagtttggattagaagagtggaaaggcttgttttgttttgttttttaggagaaaactggaggagggaaaggcattctgatagggttgctagttagaagccaaagtttggaagtttggagtatataatccatgttttagagatattgtttagattaggcttctagggatgaaaggcgcgtgtgagatgataggttggtggccagttgtgttatcaatactgaactaaggaatctggagtttattcactaggcattagaagcctctgaaagtttttgacaaggtagggaacataatcataacaataactcacacgtattgaataccaggcaatgtgactgatgctctccctactccgtgacacttaattttctcgacaaacatacaaggtgcgttttactattccttttcattgatgagagaattatagatccagtaagccatagtttaggcttgtctgactccaaagcctctgcaccttttcgctacgctaatgattttcaaaggcacttggcacagccctatggcttcttcaaagaactctaagggaccactgagtaaatggaatggattgattgtcaggtggcccagatggccaggacccttagtcaatgagtgaaattccacttttttctgctgtataccctgcatatcacagagtgttgatttcagaaatggccaccaggaaggaggtaactaagaagccagcaacaggttctggttttggccttatgattttaacattgttatcaccaacatgatgaagacattggctgcactgttgctagtgctctgtggctccgaagagtagcttatacattgaatagcaaactgaaaattcagagagattccaaaaggctaaaacttgggtcagataatagagttcaacattaacagatatatatgtgtaatttgcatttatgtttgaaaaatgaattatataaatacaggctacagcagtggttctcagagtaatccctggttagcagcttctacatcacctgggaacttgttagaaatgcagattcttgggcctccacctcatcctattaaatcagaggctctggggatggggcttagcaatctgtgttaatgagcactccagatgtttctgaagcaggctaacattggagaccactgggctagaaagaccaaccctcctcccttcttgctttgcattatttctttctctttattccacctcattccagaaaggatttggagtggaaaaatctgacttaacaacagtttgtgaataagaacaaaggttttattttacaaaaaaatttctgtgactcaatgatgtgttgtggctgctgccaaaagtaaatagtttgcattaaaagtagtgaccagaacaagggaagcaatagctactcccctcttcacatttgacaggttctgtatatctccatattctgttagaccatatctggagtttgttgaggaactaattttaagaagacattggaaagggttttaacaaggatggtgacacaccttgaacttttgccttaaagggatcagttgagggaagccacctcttgtgactagagcctgacatggaaaagaaagaattttacatcttgctccagagggcgaaaaacaatattggaaagccttctccactggtattaagagggaaagacattagtccaggctcttcctgaagggctttgttaacacacctaagtgcttcaggcttccgttttttgtttgtttgtttgtttgtttttgttttttatttagttggagtcttgctccatcacggaggctggagtgcagtggtgtgttctcggctcaccacaagctccgtctcctgggttcacgccattctcctgcctcagcctcccgagtagctgggattacaggtgccagccaccacgcccggctaattttttgtatttttagtagagacgggatttcaccgtgttagccaggatggtcttgatctcctgacctcataatctgcccacctcagcctcccaaagtgctaggattacagatgtgagccaccgtgcccgacctggtcttctgtttcttttagaatgcagataataagggccatgatgttcatcccacaagatttctgtgaagggctaaaaacatggcaaaaagttcaaatatttgaaaaactacaatggttgtacaaatatgaggcaatggcgctattattaaggaagactagttgatggaaattttaagtccaagataatggagaatctcaacaatatggattgtccaaaagggggacgacctttctcattaaatagtgagttcacggtcatgagaggcctttagacaaagagatgttagagaatgaactgtatgggattgaagcagatggtttcaaagtgccttgccaatgccagtatttcataatgctgaagtgaatgacttgaggtcaggcagatctgagagactcgtgctcacagccagcagagtgaatgtttgattcatcatttgttcatcactacttgcaagtcactgcaaacatttaaaacatttaaatacatttaaacactgaacacacttaaagatatttaatgattaaacatatttaaagcgttaaaaacattaaatgcatttaaaaacaagatgggcccacactaatgaacctggtgtcaatttttctctacagcactatagttaaattccctttgcattagaagtctgattgaatagccccatggtctcctgtggatctgttgatgtatgaatttggaaagtaacattgaattcccaatgctttcttataactctttgcaatgtctcatagacgtgtaagagatgttgcccttagtgtctaacccaagtcctgagttgttttacagcatttttattttaaggttaagatttcttctggctataattttgcatctagacttctacttgttttttcccccctcaaactattgggtaacatcagtgactttcacctttatccactgcccagttggctgctttccaatggcagagaaatgaatggatgcttttgtgtagggagttgtgtaattcaatgaagagcttggagccttgctgaaggcgatatgtgggtatttcacacatattatatctaatgattatatatcagtaatgtaatgaaggtggcattcaaacatcactgtgggtggcagctaagccaaagacagctaaatcttatttttaatacatgagaagcccccttttctaattcaatcagaaacagttgttggtcagttaaagattaaaaaatcagttaaagccagggattagaaaaacataggagagagaaacagaaagagagagatgcaaaccttaaatttttaaaacttaaaacaaatatatatgtatgtacatatggatgtatacatacacattcacatgctgaggctgagttctttttgtgaaaggccaaggacttttctttgacatggatgtgccaattaccaatccatgtcattttgttttgtataaatcacatttatagtgcatcatctacaatttctatttttatttttctgaagtagagatgtttaaggacaattgctgagcaacctgagtgtaggattcttctaactttttatcgtattatttcttctgtagctgtctctctcacacctaaaattagaaaaaaaattattgtgataaaatatacataatataaacattacagtttaaccatcctttaagtatacaagtcagcagcattaagtacattcaccacaatattgtatagccatcaccactatccatttctagaactttttttatcgccagcagaaactctgtacccattaaacaataccttctaattaccttctacacccctactaacctctaacctctattctgcttcttttttttcttcttatttatttattttattattatactttaagttctagggtacatgtgcacaatgtgcaggtttgttacatatgtatacatgtgccatgttggtgtgctgcacccattaacttgtcatttacattaggtatatctcctaatgctatccctcccctctccccccacctcaggacaagccccagtgtgtgatgttccccttcctgtgtccaagtgttctcattgttcaattcccacctatgagtgagaacatgcggtgtttggttttctgtccttgcgatagtttgctgagaatgatggtttccagcttcatccatgtccctacagaagacatgaactcatcctttttttgactgtgtagtattccatggtgtatatgtgccacattttcttaatccagtctatcattgatgggcatttgggttggttccaagtctttgctattgtgaatagtgccgcaataaacattcgtgtgcatgtgtctttatagcagcatgatttataatcctttgggtatatacccagtaatgggatggctgggtcaaatggtatttctacttctagacccttgaggaattgccacactgtcttccacaatggttgaactagtttacagtcccaccaacagtgtaaaagtgttcctatttctccacatcctctccagcacctgttgtttcctgactttttaatgactgccattctaactggtgtgagatggtatctcattgtggttttgatttgcatttctctgatggccagtgatgatgagcattttttcatgtatctgttggctgcataaatgtcttcttttgagaagtgtctgttcatatcctttgcctactttttgatggggttgtttgattttttcttgtaaatttgtttaagttctttgtagattctggatattagccctttgtcagatgggtagattgcaaaaattttctcccattctgtaggttgcctgttcactttgatggtagtttctttttgctgtgcagaagctctttagtttaattagatcccatttgccaattttggcttttgttgccattgcttttggtgttttagacatgaagtccttgcccatgcccatgtcctgaatggtattgcctgggttttcttctagggcttttatggttttaggtctaacatttaagtctttaatccatcttgaattaatttttgtataaggtgtaaggaagggatccaatttcagctttctacatatggctagccagttttcccagcaccatttattaaatagggaatcctttctccatttcttgtttttgtcaggtttgtcaaagatcagatggtcgtagatgtgtggtgttatttctgagggctctgttctgttccattgatctatatctctgttttggtaccagcaccatgcttttttggttactgtagccttgtagtatagtttgaagtcaggtagcatgatgcttccagctttgttcttttggcttaggtttgtcttggcaatgtgggctcttttttggttccatatgaactttaaagtagttttttccaattctgtgaagaaagccactggtagcttgatggggatggcactgaatctataaattaccttgggcagtatggccattttcacgatattgattctccctatccatgagcatcttttttttttttttttttttttttctgagacagagtcttgctctgtcagccaggctggagtgcagtggcacgatctcagctcactgcaacctccgcctcctgggctcaagcaattttcctgcctcagtctcccgagtagctgggattacaggtgtgtgccacaacacccagctaatttttgtatttttaatagagacggggtttcaccatgttggccaggctggtctcaaactcctgacctcaggtaatccacctgccttggcctcccaaagagctgggattacaggcgtgagccactgtgcctggcctattctgctttttatctctatgaatttgcctatttaaagtaccttttgtaagtggaatcacaatatttgtccttctgtgtcagcttatttcacttagcataatcctcagagttcatccatgtcatgtagcatgtgtctgaattttattctttcttatggctgaataatatcttagtggatgagtgtactacattttgtttatgcattcatctcttgatgagtacttgaattttttcccaccttttgactattgtgagtaatgctgctatgaacattgatgtataagtattgcttgagtgccagctttcagttcttttggctatatatcttaagaatggaatttctggatcatggggtaattcaatgtttgcctttttgaggaactagcaaactgttttccaaaaaactttctttcctataggaacttgtctttatgaagactttccaagacagtcaactggctttcggagaagaaacagctctctttacttttggtcctgcatttcatcagtttctagaccatttaattaacttgcataattacaataacaagtccaagtgtcataagcaggtttagaaatgtatatcatttcatgctttctagggaaaaaaagaaatgtataaaattgatatttgttaagcatacaactcaactggtaagagtggaagtgcttggagagtaactttccccaatgatccccagtgtgctttgggcatcagccaatatatattataaaacacagaattaatggagaatgctggttactctggccagttaaggggaggccagttaagagagcttctactattcaactaaattatctttgtcatgataagatacataaagaggccgggcgtggtagctcaagcctgtaatcctagcactttgggaggctgaggtgggtggctcgagaccagcctgggcaacatggcaaaaccccgtctctactaaaaatataaaaaattagccgggcatgggtggcgcacacctgtagtcccagctactccggagtctgaggcgagagaatcacttgaaccctggaggcggaggttgcagtgagccaagatcacaccactgtactccaacctgggtgatagagtgagaccctgtctcaaaaaaaaaaaaagtataaagaaatttagaagcaaatgactcatgaatctagaaaaacaattaacagctacatatccacaactactaacattcaatactcttgttgtttggagacctgagaaagacagacagcaaaggctaaaatagaatgggaagttgactgatctggtcacttcctgtataaacttttgaatgtaagcagcaggttgattttccatgccttcttctcttacagttcaatttagtgtgggtgataaatgggagataaacagaggatagtgaggttgtgcctattcttaggaagaagatacctttcaagttaagattcaagactttacgatgtgattagaaggttttctagatagttctgaagcaaaatcatgaagctgtaggaggaatacttttatatagcatcattcatccttgttagcaacccaaatgattaaaggtttgggaaattacacctttaaatatggtctaaaggaactgggtttatttagtttagagaaagcaagcaagcacgctgagggggacttaatcatagtctccaagaatatgagggatattctctgagtgatggaaagcagctgtttcctgtttccactaaggactggataagaagaatggagttaacatgcaacaagtgggttaagaactctttggccatgaagttcaagacaacaaatccaccagacaaaagtcgctactgtgtttgagaattatgtagctaactaactgtatttcttgggtggtttatatgtggcctgttcatgagtctggagctagtgaaaaagatccagaggacctttcacccaagtgagaggatgagattgtctgttttctgagcctaccagtgctctgtggttgaggaagctcttatcgtagttctcctagtaggatttaaaagagaaaaagcttcagagtctctttgctgctctttggactctttccaagtaagataatctaaatgtactccttttctataaggtggaagatttatatagatttggcattatgtgtcttttctgcttatttggtcgatatggccataatttttaaaaattctgtgtctttagtgaaactggacatatatatacacacatatatacatgtatatgtatgtatatgtcatagacatttgacatgtatatcataagtaattaattcagcaatggagacaatgtttagttctaggtagtatgtctaaatgttagctatgtgaataagataatacactgtgctaattagcagcacagaaatatgcaaagcattttgtaaaaatgcactgttgcagattagctaggggaagaatttagagacaaaacgatgagttctgtgaatgttaccagtttttagtcaatgaggcagatcagaatgcctgaaaactgcttctcaaccattgtttttcttattcctgttccatagtaggttaattataccatttattcagaattagataagtgatgtcttactttcccaactgggagtattttcaaggcaaggtttgattcctaggagatggactgctattaagctgtatctttaaagctgtagctttatgccaacattcattgtgtatacgttccactatcttatattttcatcttgtaccagcatttattttaatcttatttaaaaatctttgcctctgtcattgaatgttttcttgactcaataacttgtttggcctttaaaaatccagcactgaagtgggaaaatgactcgggattgagttggatcatctcttcacacttgttcactgggaggcattgggcaagttagttaacctccttgagtttgcttccttaatctaccctacaggaacattttgaggattaaataaaataaaataatgcatgccaagcccagagcgtagtgtacccagccctcaagtcatgtttatctgctttctttaattcgcaaagaacatttcttacctatcatagagccattgttgcctccacattctcttcttttagtggaggttttggaccacaggggcagatctgtagaataagtcttgtgtaaaattcatgagggcacccaagggtctaattgtatgaatctccttccttttctatatttacttaatccagaaaaaagtctaccattatggcaagtattttaggaagcgtctgttgccaaattacctgaaacaaatcatgtacacacatggaaggaaagtacattttcagatgagtggaaagatgatgcatttttgttttacaaggtttaaaggatagttaataaatcttctagatactgaaataaacatttaatagatattgattcaattgagtgctatggtttgaaacgatatcaaattgaagacatgatccctgacctgggaagttttatgaatttgctggagagaccaagcccataggtatggaatgaccacaaaacagagtagtacaaaaatccggaagagtagtacaaaaatgacagcttgaacccctaagtactgaggaaaggcagcatacagggtttcagtagggatttactatagtagacttagaatcatgatttagttcctaaaaccactatcatttcaaaatagaatttttttaaaaccacctaaaatattcacttcctttcgaaacctaggaacatactacagttgcgctttactcatttgagataaatacacctttcttgaaatgttaactttttctttattttttttgtttttgagaggcaatcccactctgtcacccaggctggagtgcagtaatgccacctcggctcactgcaacctccgtctcccgggttcgggtgattgtcctgcttcagcctcccgagtagctgggattacaggcgcccaccactgtgcctggctaatttttgtgtttagtagagacagggttttaccatgttggccaggctggtcttgaactcctgacttcaagtgatccgtccaactcagcctcccaaagtgctgggattacggtgagccaccacgcccagcctgagataaatacatcttcctaaagcctcagtgtttaggctggtttgctttcagatattcatctatgcaccataccaaactacttctgctgagattcattctgagtctgcaggggatggaatacctttataaatcataacaaatcacattaagagtaaaatatcccagctagggacttacctcaaaagctgaggcatgacacatattttaatggcaatggatttggaaaccaaggttaggaccgttctttctttattagaaggagatttataattcagggcctttgagagtgagcctgggtcctctgaactggacttctcctcttgtcccttcctgtaccccaactccccaaattaaataagtagggaagcagaacaagaaaaccattaacttaatagcatagaatttatggctgaaatcttgcaaagcttatgtcagcaaagtaaaataattactgtcactttcttttagacacttggctttatggttcctgtcacctttatcataacatgcagctgatttagtagctattttttcatggcaaatagcctggtgttgtgtttttatgcatgtgaccatgcaattgagatgacaatgcatggctatactacagtagagctaaatttaggtaatgaattagaacactgttaatagttttggtttagtcatgctgtcagaatgccaactcagccttttctcttgctctttttcccctccagattctcaagtccaaagatttaacatctccaacccagcgctacatcgacagcaaagttgtgaaaacaagagcagaaggcgaatggctctccttcgatgtaactgatgctgttcatgaatggcttcaccataaaggttacaagccactctctcttttcctcccaagatgttcagtatccctaagttactttaaattgattgcagatttaagggtatagacacacatacaaatgacctccttgacttaatgttttccagacaggaacctgggatttaaaataagcttacactgtccctgctgcacttttgtaccatctaataattacatcatcccaaataaaagtgaagaactagaagcaagatttgcaggtaaccaaaacttggtcatatgaggtgggggagggaagggtctatattgataatctcatgggggataaaatcagtttgcatgtgaaaatgagactggtaaggcctggggagtttcattcatttggacagtgatatggttggatatacatatgtgaagggagaaaggattggaagaacggaataggttcccagtttataattctcaatgcccagtgatgacttggtcaataataactgattaactcattaaccctccagtagtaagttaaggcctttgttcttcattgtagcaaaccaactttccatctatactgatattatagagaaagatagaatgtgtttaagaaaattcattgataatcccccaaaccaaatgtcaggaactgacaaccgtatttcacagaagaaaggagtctcctcctgctacagcttccataactaaccttccatgtataagaacattccaccttttctagtccatacccagtatttcaagtgggttccttatcagaattttatattagtttataaacacataaaaatgttttggctttccccacgcttacctttaagtaagttggacaaaagtcatggagagtgaggcgataccaagggctcaagtcacttcatgtattagatgatgagttgttggatgatgagaggtgagaggaaatccatgcctatgtgccgatacagcatctgcccacaatgccaggccagagaattgatttccctgccctcctaacatcacccaggacctccatccacttttagaagactacagcagcccttgctcatggaaaaatactcccagaggtctagagatttatttcagtctctaacctagtcatgattctctggagtgtggagattaaatgcttaaactggcagtctcttgagcatgctttggggagctcaagtttctaaatctcagatggaatcaggaaagtgttgaggatgccataaaataaatgaaaaagccctttcttcacagcttcccaaaatagcattaggtaagggtgacttctgtttcacttgaacctaattcactccaattcagttaagtctcagtttatgttcattaggaaagtcttttgagtttagtagtcttaggaagagtgtgaaccagcgggtgacaaggcatgttctattgccatgtgttcagttgttgagggcttgaacgcagcctaaactgaggattgactaaaataaactgcctagattgcccttggactataggtcaaagactgcttctgtagtgactttcataaccaacagccctggctttgacaccgaactgccttctgacaagagccccatttagaagtgttaattgtcacgtgggttagtcgtagtcctgttgtgccatatctatttccatggggaataactgttgccagctgatgctgctttggtggtcatcactgctatttgtgacaatatacaaaggaaaaaaatatggctgactatatttgatgaaggtgaagctaaatgtttattacccaaatgcattttttcaaggtattgatggcacctccacatataccagtggtgatcagaaaactataaagtccactaggaaaaaaaacagtgggaagaccccacatctcctgctaatgttattgccctcctacagacttgagtcacaacagaccaaccggcggaagaagcgtgctttggatgcggcctattgctttaggtaaaggaaagaaaagtaaaaccaagtaattgcatctgttaactcttaaactgcctttgccctttcttttactgtgtattgacccaagtggaactcactgctaaggccagatagagtgcagtacagctcctgtgtctcataataccattcttcccagaggcttatattcatcaggtctttagcagtgaaccaagtgtgaagggagaaaactaaccccctgaattttttccccaaaattcctctgaagttctttggtgctgaagaagaaaacaagctctctgctcctcagaacaaataaaagcttatttgaggtgtgtgatgtcaactccttaattaagaaagacccaccatctggatgatgccttcatcctcaccaagtccaagtgctgatagtcacacttctttcatagtaacagagatgagacagcagaagaatgccgtgtgtcacacctttagcaacagcatatgagagaagcaagaagaatttatttcccattcccacatgagtgcatggagggagaatgtgaatgttcttatgtggtctcagtaagaggagggctctttccttattttgagaggtacaggacagggaagggtcctcactgatgaagtgctcaaaatgtcagaggccatgagtaaagtggcactttttggttgccagatccagtggttgccctcagcaagactccatgtttcttgatctctggttcattcctagatcagagaacatgtggtgaaacaaaggatcaattctcaaaggaaaacgccttagatggttgtttgaaaattgctgttgtacttctttcattttatatttgaaagggcaatagaggctggatggcagaactgcccagtgttgattggaaagggcttcatcatgcccagccactctctgcttatatctggtcatctgaaggtaaatgtatgattttccaggtcacagacaaggaagtcagggtatagaactcataagggcaagtagtccagcaaatcaccaccacatacaacaccctatcatgaaagtcacttgagattacaataaagccattaaaacctggcccatgatatttgctcattagatgtttgttgaataaatgaatgaatcatttttctggtttggggtgaggtggtggtagagtgagggtggtgaatcagctttaaaatctccattgctttttttttttttttttaacagaaatgtgcaggataattgctgcctacgtccactttacattgatttcaagagggatctagggtggaaatggatacacgaacccaaagggtacaatgccaacttctgtgctggagcatgcccgtatttatggagttcagacactcagcacagcagggtgagtgttcagcttacctgttgcctctgttcttgggttaccatgtgcacctgctgatagtatttccaaatgagttgtaattaacctcgtgctgtcttaccatcacacatgtatgggtactggagaaaaatctttcattaggttggtgcaaaagtattcgcagtttttgccattgaaaataatggcaagaaactcccctaatagatgaggaggaagaatgttaactgtaggtgaaatcagaaagtgacactgatcggttacaaaccataagtctcacctgcccagttattaacaactggagggaagttttgtttacttttttctttattttatattctttttcaaaaacaatttttattgatacataattgcatatattaatgaggtacatgtgatattttgatacatgtatacaatgtgtaatgatgaaatcagggtaattaggatatccattgcctcaaaaatttatcatttcctcatttggggaacattccagatcatctcttctagttactttaaaatagacaataaattattgttaactatagtaaccctactgtgctataaaacattagaatttattccttctatctaactgtattttcatacctattaatcaacttctcttcacccttaccctgttcccagcctctggtaaccatcattctactctctgcctccataagttttatattcttaacagctataagcataaatagccaagaaaacaccctttttagaatcaatatgtcacatagtatcatatatagataaagtgtgaagggacccaggtctccatctaaaaaaaaaatctgctatcatctccatcagagactgttatattagaaagaacattggggatttcagttaatgcctgggagtgtgtgattattagtaaatacactatcaatttactaatgtatgacagaatgtaatttaacatctctaaacctcagtttcttatcagtaagaaggaatgtctgtattaaaagttatctttaaaataataatgccaaactcaagagttgatatgaagtacaaaagatgatatacatgaaaatgacttgaaaattcgtttctctactttttttttaatgtaacacaaagtaaatgagaatctgagtattttatcaagttgtttcaatgaagacagagttgattcagaaggtaattcccagattggatggtatgagtttccggcaagattagagaagagtttttctatgtaataatgatatttgttcacatgcttcctcttgatggctcatcaggattttagagatagaaaggacatcttatccaacgctttcattttcttaaagaaattggggaccgggcgcagtgactcatgcctgtatttccagcacttcgggaggccgaggcaggtggatcacgaggtcaggagttcaagaccagcctggtcaagatgatgaaaccccgtctctactaaaaatacaaaaaaattaaccaggcatggtggcgggtgcctgcaatcccagctactcgggaggttgaggcagagaatcgcttgaacccaggaggcggaggttgcagtgagccgagatcgcaccactgcactccagcctgggtggcagagtgagatcctgtctcaaaaaaaaaaaaaaaaaaaagaaattggggtctagatcatgtagtctagatgatacccaaaaccaaacagaaaattagtgacaaaccaaggcttggcatgcaggcctccttgttttataaccaggcctccatttgctctatcttagtgggtttaattcctaaaatatggttacacgttagggtttctattctgctctttatgcctctgtaaatctccctattaaagaagcattagaaaaattgccttcactgcagggtaggaaaatggatcagctgccaaaaaagatcacatactacattcagctgaattcatgagtttgggggttatcaattattttagacaatctgtattataaaaattcctctttagttcatatgaaaactcatgtgttcagggagcataaagtatatttatttataaatacctacatatgctggaatttaaattgacaaatacggctcctcttccttcagctgttttcccaactcccctgtagactttggcactcgggggcgaccgtgtgcttggccatgtgagggaagcttgctcatgcctgtccctttgtctgagctctctggccaggctgcctcctctgggctgcggcagcagtagctgtaatgtgggcaaggccctgttgccaagtagaaacataattctcctctctgatacacagagggagtgtgtgaaggctgagaccatgcttgtttttcaaggagagaggaagaataactgtcatggtcacaaatatgtggtttggacagttacccaagaagccagaggtagcttaataaagtagtcagtgttgctgtgctgaacagatcttctgtcttaggctgaaaaaattgcagtgaatctcgaggaaaaggtcacttgctgtttgactaacacattaatggcatccttggaaatgtctctgtatcatcagtggggaacctacatacttccattagtaaaagtctcacacccctctgatacagaatggggttgaaggtgtaaggctaattatagaaccgtctcttcattctgttttcagacttgccattaactcctccaactcagcaactaccatttaccgcataggttagtggagggttgattatgattgtgattatgattatgatcgttttaagcaaaatgtaagaaagtgaataattatttcttataggagatcttagagatcacttttatgtcatttctagcatcactgtgtttatgaagcaatggtaaaaaaacaggcttttttttttttaatgaaaattgaggataccttaaattggcctgaggagacacttaacgtagaaagatttcatttccttccttccttatttatttatttaaagaaacagggtctgggtctgttgtccaagctggtcctgaactcctacactcaagtgatccttcaaagtgttgggattacaggcgtgagccaccgtgcccagcctgtagaaagatttcacattgcatacaggtgtctttttctatacccaaaggtagattaaagctcttatgagagctttgataaaactttttattcttctacttattcatgtattcatttcttcacttagtacatgaatctcattttgtccagagaagacttactagggccacaagataaaagcaaagtctgtagagttcctgatctggagggagctcttaatctagatgggattgaaatgtatactcaagaaacaacttcatttacagagtagtgtagaaataagaccaaatgctataaggatcaagttttgtggggacctaggatgtatgtgcagccaagcactgatcagaggaaagacttactggaaaaaccgggaaaatctgttgaatgagcaattttttccaatctgactcttacagaatcatttgcttaagatgtgtggaaaacgagttccgtgtgggaaaataatgactttggtgattgctaaggtcacatatcagtttgactgtaatttaggaaattagcaaccaaaaataattttaaattgcctactcagtgctgtgactgctaacaatgtggaattctttttaaaaacgaattgcgttcattttccgtctttccctatgttgtctctcctctcctgtgtcctttcaggtcctgagcttatataataccataaatccagaagcatctgcttctccttgctgcgtgtcccaagatttagaacctctaaccattctctactacattggcaaaacacccaagattgaacagctttctaatatgattgtaaagtcttgcaaatgcagctaaaattcttggaaaagtggcaagaccaaaatgacaatgatgatgataatgatgatgacgacgacaacgatgatgcttgtaacaagaaaacataagagagccttggttcatcagtgttaaaaaatttttgaaaaggcggtactagttcagacactttggaagtttgtgttctgtttgttaaaactggcatctgacacaaaaaaagttgaaggccttattctacatttcacctactttgtaagtgagagagacaagaagcaaattttttttaaagaaaaaaataaacactggaagaatttattagtgttaattatgtgaacaacgacaacaacaacaacaacaacaaacaggaaaatcccattaagtggagttgctgtacgtaccgttcctatcccgcgcctcacttgatttttctgtattgctatgcaataggcacccttcccattcttactcttagagttaacagtgagttatttattgtgtgttactatataatgaacgtttcattgcccttggaaaataaaacaggtgtataaagtggagaccaaatactttgccagaaactcatggatggcttaaggaacttgaactcaaacgagccagaaaaaaagaggtcatattaatgggatgaaaacccaagtgagttattatatgaccgagaaagtctgcattaagataaagaccctgaaaacacatgttatgtatcagctgcctaaggaagcttctt

SEQ ID NO: 11 - DNA, 3445 bp, Homo Sapiens
aaatctcccctccccggcaagatcgtgatgttatctgctggcagcagaaggttcgctccgagcggagctccagaagctcctgacaagagaaagacagattgagatagagatagaaagagaaagagagaaagagacagcagagcgagagcgcaagtgaaagaggcaggggagggggatggagaatattagcctgacggtctagggagtcatccaggaacaaactgaggggctgcccggctgcagacaggaggagacagagaggatctattttagggtggcaagtgcctacctaccctaagcgagcaattccacgttggggagaagccagcagaggttgggaaagggtgggagtccaagggagcccctgcgcaaccccctcaggaataaaactccccagccagggtgtcgcaagggctgccgttgtgatccgcagggggtgaacgcaaccgcgacggctgatcgtctgtggctgggttggcgtttggagcaagagaaggaggagcaggagaaggagggagctggaggctggaagcgtttgcaagcggcggcggcagcaacgtggagtaaccaagcgggtcagcgcgcgcccgccagggtgtaggccacggcgcgcagctcccagagcaggatccgcgccgcctcagcagcctctgcggcccctgcggcacccgaccgagtaccgagcgccctgcgaagcgcaccctcctccccgcggtgcgctgggctcgcccccagcgcgcgcacacgcacacacacacacacacacacacacgcacgcacacacgtgtgcgcttctctgctccggagctgctgctgctcctgctctcagcgccgcagtggaaggcaggaccgaaccgctccttctttaaatatataaatttcagcccaggtcagcctcggcggcccccctcaccgcgctcccggcgcccctcccgtcagttcgccagctgccagccccgggaccttttcatctcttcccttttggccggaggagccgagttcagatccgccactccgcacccgagactgacacactgaactccacttcctcctcttaaatttatttctacttaatagccactcgtctctttttttccccatctcattgctccaagaatttttttcttcttactcgccaaagtcagggttccctctgcccgtcccgtattaatatttccacttttggaactactggccttttctttttaaaggaattcaagcaggatacgtttttctgttgggcattgactagattgtttgcaaaagtttcgcatcaaaaacaacaacaacaaaaaaccaaacaactctccttgatctatactttgagaattgttgatttcttttttttattctgacttttaaaaacaacttttttttccacttttttaaaaaatgcactactgtgtgctgagcgcttttctgatcctgcatctggtcacggtcgcgctcagcctgtctacctgcagcacactcgatatggaccagttcatgcgcaagaggatcgaggcgatccgcgggcagatcctgagcaagctgaagctcaccagtcccccagaagactatcctgagcccgaggaagtccccccggaggtgatttccatctacaacagcaccagggacttgctccaggagaaggcgagccggagggcggccgcctgcgagcgcgagaggagcgacgaagagtactacgccaaggaggtttacaaaatagacatgccgcccttcttcccctccgaaactgtctgcccagttgttacaacaccctctggctcagtgggcagcttgtgctccagacagtcccaggtgctctgtgggtaccttgatgccatcccgcccactttctacagaccctacttcagaattgttcgatttgacgtctcagcaatggagaagaatgcttccaatttggtgaaagcagagttcagagtctttcgtttgcagaacccaaaagccagagtgcctgaacaacggattgagctatatcagattctcaagtccaaagatttaacatctccaacccagcgctacatcgacagcaaagttgtgaaaacaagagcagaaggcgaatggctctccttcgatgtaactgatgctgttcatgaatggcttcaccataaagacaggaacctgggatttaaaataagcttacactgtccctgctgcacttttgtaccatctaataattacatcatcccaaataaaagtgaagaactagaagcaagatttgcaggtattgatggcacctccacatataccagtggtgatcagaaaactataaagtccactaggaaaaaaaacagtgggaagaccccacatctcctgctaatgttattgccctcctacagacttgagtcacaacagaccaaccggcggaagaagcgtgctttggatgcggcctattgctttagaaatgtgcaggataattgctgcctacgtccactttacattgatttcaagagggatctagggtggaaatggatacacgaacccaaagggtacaatgccaacttctgtgctggagcatgcccgtatttatggagttcagacactcagcacagcagggtcctgagcttatataataccataaatccagaagcatctgcttctccttgctgcgtgtcccaagatttagaacctctaaccattctctactacattggcaaaacacccaagattgaacagctttctaatatgattgtaaagtcttgcaaatgcagctaaaattcttggaaaagtggcaagaccaaaatgacaatgatgatgataatgatgatgacgacgacaacgatgatgcttgtaacaagaaaacataagagagccttggttcatcagtgttaaaaaatttttgaaaaggcggtactagttcagacactttggaagtttgtgttctgtttgttaaaactggcatctgacacaaaaaaagttgaaggccttattctacatttcacctactttgtaagtgagagagacaagaagcaaattttttttaaagaaaaaaataaacactggaagaatttattagtgttaattatgtgaacaacgacaacaacaacaacaacaacaaacaggaaaatcccattaagtggagttgctgtacgtaccgttcctatcccgcgcctcacttgatttttctgtattgctatgcaataggcacccttcccattcttactcttagagttaacagtgagttatttattgtgtgttactatataatgaacgtttcattgcccttggaaaataaaacaggtgtataaagtggagaccaaatactttgccagaaactcatggatggcttaaggaacttgaactcaaacgagccagaaaaaaagaggtcatattaatgggatgaaaacccaagtgagttattatatgaccgagaaagtctgcattaagataaagaccctgaaaacacatgttatgtatcagctgcctaaggaagcttctt

SEQ ID NO: 12 - protein, 442 aa, Homo Sapiens
MHYCVLSAFLILHLVTVALSLSTCSTLDMDQFMRKRIEAIRGQILSKLKLTSPPEDYPEPEEVPPEVISIYNSTRDLLQEKASRRAAACERERSDEEYYAKEVYKIDMPPFFPSETVCPVVTTPSGSVGSLCSRQSQVLCGYLDAIPPTFYRPYFRIVRFDVSAMEKNASNLVKAEFRVFRLQNPKARVPEQRIELYQILKSKDLTSPTQRYIDSKVVKTRAEGEWLSFDVTDAVHEWLHHKDRNLGFKISLHCPCCTFVPSNNYIIPNKSEELEARFAGIDGTSTYTSGDQKTIKSTRKKNSGKTPHLLLMLLPSYRLESQQTNRRKKRALDAAYCFRNVQDNCCLRPLYIDFKRDLGWKWIHEPKGYNANFCAGACPYLWSSDTQHSRVLSLYNTINPEASASPCCVSQDLEPLTILYYIGKTPKIEQLSNMIVKSCKCS

SEQ ID NO: 13 - DNA, 3360 bp, Homo Sapiens
aaatctcccctccccggcaagatcgtgatgttatctgctggcagcagaaggttcgctccgagcggagctccagaagctcctgacaagagaaagacagattgagatagagatagaaagagaaagagagaaagagacagcagagcgagagcgcaagtgaaagaggcaggggagggggatggagaatattagcctgacggtctagggagtcatccaggaacaaactgaggggctgcccggctgcagacaggaggagacagagaggatctattttagggtggcaagtgcctacctaccctaagcgagcaattccacgttggggagaagccagcagaggttgggaaagggtgggagtccaagggagcccctgcgcaaccccctcaggaataaaactccccagccagggtgtcgcaagggctgccgttgtgatccgcagggggtgaacgcaaccgcgacggctgatcgtctgtggctgggttggcgtttggagcaagagaaggaggagcaggagaaggagggagctggaggctggaagcgtttgcaagcggcggcggcagcaacgtggagtaaccaagcgggtcagcgcgcgcccgccagggtgtaggccacggcgcgcagctcccagagcaggatccgcgccgcctcagcagcctctgcggcccctgcggcacccgaccgagtaccgagcgccctgcgaagcgcaccctcctccccgcggtgcgctgggctcgcccccagcgcgcgcacacgcacacacacacacacacacacacacgcacgcacacacgtgtgcgcttctctgctccggagctgctgctgctcctgctctcagcgccgcagtggaaggcaggaccgaaccgctccttctttaaatatataaatttcagcccaggtcagcctcggcggcccccctcaccgcgctcccggcgcccctcccgtcagttcgccagctgccagccccgggaccttttcatctcttcccttttggccggaggagccgagttcagatccgccactccgcacccgagactgacacactgaactccacttcctcctcttaaatttatttctacttaatagccactcgtctctttttttccccatctcattgctccaagaatttttttcttcttactcgccaaagtcagggttccctctgcccgtcccgtattaatatttccacttttggaactactggccttttctttttaaaggaattcaagcaggatacgtttttctgttgggcattgactagattgtttgcaaaagtttcgcatcaaaaacaacaacaacaaaaaaccaaacaactctccttgatctatactttgagaattgttgatttcttttttttattctgacttttaaaaacaacttttttttccacttttttaaaaaatgcactactgtgtgctgagcgcttttctgatcctgcatctggtcacggtcgcgctcagcctgtctacctgcagcacactcgatatggaccagttcatgcgcaagaggatcgaggcgatccgcgggcagatcctgagcaagctgaagctcaccagtcccccagaagactatcctgagcccgaggaagtccccccggaggtgatttccatctacaacagcaccagggacttgctccaggagaaggcgagccggagggcggccgcctgcgagcgcgagaggagcgacgaagagtactacgccaaggaggtttacaaaatagacatgccgcccttcttcccctccgaaaatgccatcccgcccactttctacagaccctacttcagaattgttcgatttgacgtctcagcaatggagaagaatgcttccaatttggtgaaagcagagttcagagtctttcgtttgcagaacccaaaagccagagtgcctgaacaacggattgagctatatcagattctcaagtccaaagatttaacatctccaacccagcgctacatcgacagcaaagttgtgaaaacaagagcagaaggcgaatggctctccttcgatgtaactgatgctgttcatgaatggcttcaccataaagacaggaacctgggatttaaaataagcttacactgtccctgctgcacttttgtaccatctaataattacatcatcccaaataaaagtgaagaactagaagcaagatttgcaggtattgatggcacctccacatataccagtggtgatcagaaaactataaagtccactaggaaaaaaaacagtgggaagaccccacatctcctgctaatgttattgccctcctacagacttgagtcacaacagaccaaccggcggaagaagcgtgctttggatgcggcctattgctttagaaatgtgcaggataattgctgcctacgtccactttacattgatttcaagagggatctagggtggaaatggatacacgaacccaaagggtacaatgccaacttctgtgctggagcatgcccgtatttatggagttcagacactcagcacagcagggtcctgagcttatataataccataaatccagaagcatctgcttctccttgctgcgtgtcccaagatttagaacctctaaccattctctactacattggcaaaacacccaagattgaacagctttctaatatgattgtaaagtcttgcaaatgcagctaaaattcttggaaaagtggcaagaccaaaatgacaatgatgatgataatgatgatgacgacgacaacgatgatgcttgtaacaagaaaacataagagagccttggttcatcagtgttaaaaaatttttgaaaaggcggtactagttcagacactttggaagtttgtgttctgtttgttaaaactggcatctgacacaaaaaaagttgaaggccttattctacatttcacctactttgtaagtgagagagacaagaagcaaattttttttaaagaaaaaaataaacactggaagaatttattagtgttaattatgtgaacaacgacaacaacaacaacaacaacaaacaggaaaatcccattaagtggagttgctgtacgtaccgttcctatcccgcgcctcacttgatttttctgtattgctatgcaataggcacccttcccattcttactcttagagttaacagtgagttatttattgtgtgttactatataatgaacgtttcattgcccttggaaaataaaacaggtgtataaagtggagaccaaatactttgccagaaactcatggatggcttaaggaacttgaactcaaacgagccagaaaaaaagaggtcatattaatgggatgaaaacccaagtgagttattatatgaccgagaaagtctgcattaagataaagaccctgaaaacacatgttatgtatcagctgcctaaggaagcttct

SEQ ID NO: 14 - protein, 414 aa, Homo Sapiens
MHYCVLSAFLILHLVTVALSLSTCSTLDMDQFMRKRIEAIRGQILSKLKLTSPPEDYPEPEEVPPEVISIYNSTRDLLQEKASRRAAACERERSDEEYYAKEVYKIDMPPFFPSENAIPPTFYRPYFRIVRFDVSAMEKNASNLVKAEFRVFRLQNPKARVPEQRIELYQILKSKDLTSPTQRYIDSKVVKTRAEGEWLSFDVTDAVHEWLHHKDRNLGFKISLHCPCCTFVPSNNYIIPNKSEELEARFAGIDGTSTYTSGDQKTIKSTRKKNSGKTPHLLLMLLPSYRLESQQTNRRKKRALDAAYCFRNVQDNCCLRPLYIDFKRDLGWKWIHEPKGYNANFCAGACPYLWSSDTQHSRVLSLYNTINPEASASPCCVSQDLEPLTILYYIGKTPKIEQLSNMIVKSCKCS

SEQ ID NO: 15 - DNA, 194266 bp, Mus Musculus
  misc_feature (86243)..(87389): n is a, c, g, or t
  misc_feature (89134)..(89808): n is a, c, g, or t
  misc_feature (116252)..(116271): n is a, c, g, or t
  misc_feature (130124)..(130143): n is a, c, g, or t
  misc_feature (156397)..(156416): n is a, c, g, or t
atccttcagctgaagacgagcgatcagatctggtggacccgtgagccgtggagccgcggggagcttatgggcccggtcgcagacagagctggcagcggttcctggaggaaatagggccgagcaagccaggagcagaagggaaggaagcgcgggatcgctgatgtcagagcagcccggaaagtcgtgctggagaaaactgaagacacccggctttgagccgccccggagggaccctgcgggaccccacgccccttcacaaccgggtccctgcgcacaagcgactgggacgaagacgcgaggaaccattcgggggccaccccaggaatacaggcaagcggccggcgcgggccgaggattttaatgatcctgggttacatgtggaactggctgccagtgtgactcccgtcaggcaggactgggcgcacgctgccctgggcaaccgccagttgagcggacgaagaggggacgcagggacagacagacactgccgagctgggtaagcagcgccctccgccctttccccgagcgcgctcccgcggcggttcctccggcgcagcctcctcaggtccccttggggtcccggccccggccccggcttggttgtggcggcgagtatacgcgcgtgatccgccactttcgcagctgcagtctcctgtccaggcttccgggccatagactccagcggctctggtggttccggcgctccgtggcgcgcttatagcgcgcacctgccggctgtctgcagctctggggagcgcctgagcgacgaggtcgtcccagggttggagcccagagagggcctccgtggcactagcaagatagcctggagcgactatggccggaggccggttggggggcgttcaccaggcagtgtagtcccgggtggccgctggctgttccagtggttcagtagactgggaatcaccgggaaggagaaggcatcctttgcgtgcgttccgggaatctgtgagaacggtttggaagcactgtagttaagtgttcctgtccccatcccccatggcatagtgcccagctggggccagcccccttggtttgagcaacagtggtgctggttgaagtgggagtttgtccagagtccaagaggctccttaaagctcatttccctccatgtactcttttttgccctacctcacgaagtgataggatcttagaaaattccagtttcttttactcataggtagtcttcgtaaatgttcatcttgagctgtatgtcaaaagctgaaaatgtcattcctagggccctcaaaaatgcccacctgtttaacatgacccttgccctaggaagggctatctcttcaaatagctcaagtagagataagagggagaaaaagctggggggagggagggggtgcaacttgggagaacaggtcagtccctaccatctggaaaggagagtagttgttgagggcaagaatgttcagtgaagatccaagatcacagacagattaactctctagccactcatatgcacaacagacagaggtggatggctttggggagtgaggctaccagatgtctctgaaggccatctgtgggggattagacattttgagacacagccatccttgcagtggaccaggtctgtacagttgagtatctgggctagaacacagacaatactgagatggctgctttcaacagacctggagtcaggttcagctctctgcaattccacacaatagcaggcctgtcatactcagtctctttccagatcttgaaacttcattcttcgctctgggctgactatgaatgttggggctttccagtaagaacccgtgctcctagaggagcttaaccctggctggaggaattcagctgttcctaattgaaatgcacaactttctgtgtaatcaccctggaaaactcctacagttgcaagcagccctccatccgctgacctccaggcaggaagatagaagaattcattaacttctcttctccccacagagcatcattggaagtaattacctgtgatctctgctgggtggcctaggggtggaaaattgagagagggcagggaaccaaggaaacagagtggaatcttgccccgtaccccaggaggttgcttttttgtttgtcttctacctgacatcacctcctcttggtgctaagcccccacccatcccacaacttgcctctactaccactcgctagtgttacctaaagaacctgtcttctctttttcacagttaatcttgtccaaaaaatctgttgataaagggggctctgactgatctctgtccccatactgtcctcagaaaatttgcactgggatgggggtaaatagtcttgaaaaacaagagaatatggcttttgacccatctatagaggacactctgctgaagagcagcaagctctgaggtgccaacgagttggatagttttccctccaagggaaaaaaaggcaagggggtctctcagctgttccattttcattgttgtcagggcatagggacaaggaccctcacagactggatccaggcaggggtgaagaacagctgaccttttggcctaagactaaaggaagaacagacaataataacatatgactatcactcaagactatgccatcccaaggctgccggtccctatcagagctgccccgaacatctctcctgtctctagactgtcaatgaaggactgccctccaacatccttgaccaggagaagttgtatatgtggtagatggttaagttcagcatctgttttgcaggagttatgtgctctaaataaggttgggaagcctcaaaaaacagcctctactaggccccctctcctgcttacaaatactcctgattattcagctaatctttatttcatgggcaaggagacacaggagcaggaggggaagccagtgacatgcttaaatacacaggacagcagctggcaggagctttaagcttgccagcacaagcaatcccgaaatatttctggtactggagtcatcactgtttgtggagccttatggtttctattccaccttgctttctatgactgcctctggaagatacaggatttggtgtcggggaggcaattcctgtttccagtcccccctccccagctgtcttcctgcattgccatacagctgtctctgcacagagagactagggtacaatatacttctgtccattatggcaaatggagaggcaaccagagccaacccccctcctaaccccatgcagatcataaagagacaggagcattgtgttacagtctgttagctggaataatccaagactgcctacaggaaagcaagagaagcgggttttgaggtgctgggtggtttttacagctaatatgtacagcaccccaacactacctttctcccattgttacccctccccccagggctgtctgttatcaattcattctatgtgagtgttctgtttcttcccatcacatatgctcagttcaaacaatgatgaatggaaccgattcccttatgggaaacagttttttcacttagttacaaagatttcatgcctgattagagcaaatgaggggtgggtgtgccatcccctgcttttttttttttttttttttttggtcatttctaaaggtgacccccccccccccgtggagacaaaaagaaaggcagttcgctggggtcaaacagctggtcccattgcgcctattggaaatggctggtctgaagaagccacccctttcctctgctcagcccccagacttctttgggccctacttcctagtatatggggatatggaacctctgtacaactcattgctcaatattagattggagggcaggaatagaagtgagaatcatttttgttggggataaggtccctatggagttctagtatgagatgagagaaggaagggagggtggcaagaaaggcttacaactgagctcctccagaaagttccctgcttcagcagctggttaatcattatcctgacttggtctggcttagtctctcatctgggtagcaggttatctctgggaaaccctgagaaccagcaggtgttctccggcagtcttctcttctccgaacagagtggttggtgttggccttctctgctgtcttcctatagtccgtggcatagtacctgacccattcactctcccctcttcttctttaagcatccctccttacctgtccatttgtccaggctttaccaattgtttacatgtcagggtgcagccagcgactgaggagaagacaagggctggttgagttgagaggtctggcttcacatggaacgccaagcaatttgggtacaaatagtgaccagtttgtttgaaaatgagttagcgggggatagagaagggagtttgaacaaagcctcttgttcttcctaccgaaagactggttcactaaagactctgaacagctctggcctgtggtcctgttctagatatctgaggttagatcacttgataggaggtcctcccaaagtacttggctcatcagagctgccttgctgaactctacagaaacgcaggtagaaatggagcatgtagctcaagatacaggcatgaaggcgcacttgccataatagaagtcaggatgtagacaaggtctcagataaacagagagacaggcaggagacacagggaagataaagatactgacagtgtactgagatgggagagccagtgactgagccccaggcacaggctccttcagtgagctcagagcctgaggctctgggatgcaggaagccaaagtagcaggttttctccactagaggggactcttcaaaaccacaggttctgaaatactggcttttgtgctttttcttttcttatttggggggaaccgggggagggggggctatactggaaacccccagccattactgctcagagaccacaactggaatggcagagggcagagctggaacttttcagccctgtttggcacagaggaatgagattaggggagagaagggcccaagaagtaaggatcagcttcattataaaatgttcaccaggcttacaggggaggctagcatcatagggaatgtataggttcctgtgcatgcatgtgtgtgtgtgtgtgtgtgtgtgtgtgtgtgtgtgtatagatataactctgagaggccagccccacaggacttgtctgggtttagggggctgagagaggcttaacccatacagttcatgtctgggtggctaggggaagggatgttatattcaagtcagcaggcagttcagtcctggatgtctcatcaagtgactcttgcctttttttttaaaccagcaagtaaaattttggcccatccccaagtccctgtcacaggcctgctcgtcttcttactccctaatgtggatttccagccagtctcagcagtggcaacactgctccgagggagactttttttaaaaagacctttcaggaactaaacgcatgtcaacgttgtatcactgacttaatctttgtcttcatattctccctgggagcctgtctctgaattctaattccccctttcatttcaaaggaggacaatattgagggagaacaggcacagagtgcagaggcttctctcatccacagagataataactgtccaatggtagatggaaaaatattgaagtttggggatgggcagggaatcagagatcagtgtccctccagatctgataccatcccctgatatttaatctcagcttccctctggcttaaacttactgagggtcaagagtggagtggagggaggacatagggaaagaaagaagcaaaacaagataaatgtgtccggttatgaaagtttaatcctgcttttccttgcctgaaattactttcaggatgagagaaagaacagtaagttcaacttgtctttcagaagcagggtggggaggggccctggggcacagactgaatatgtggtaaggtaaatgactcttttccctctatgacccccaacatgcatgtgtgtgcagacttgcacacaacacacataccacacacacacacacacacacacacacacacacccctcagaggcttccagagccttctggaggccccatttctgccctgctccaccttctgcgaagactcagactcacagactttcttttttatgtttaaacagcctaccttgtagctttggtttctcctttgggtgttaagagaacattacttgagtatttgagctactgtttctgccccttatggcaagccacacagacactgaaagcaggaatcagaacacattcagatttaaataggtgcagattgatcttgtgcttgtgtgctgccaaaaatgtggtaactcaaagcccaaggatagaagggcaaaagcttccgccttcaaggaaccacaaccgcaatgtctggtgctgagggagagaactgcacaaccacacccccccaggcaccaggcaaagaaggcagggtggggttagccatgactagcctccttcccttcctgaagaaggttgttgctcagagcttgtaccctgtgtcactcagtacatggcagatttctgggaagaactggctggtacctgagagatccagggtactgttagtaggagctatttaattctacctccctaccctctgcccttcccccatgggtgaggcagcactagagttgtttcctacaacaccatttctcacagcaaagtatggagaggttttcctgctgcattcttccccaatatcccagaagtggaagtgtggacactagtgtggttcaacaggaaatgtcactgtttgtccctatttcagcctgagtgtcctaaatgaatcctatctgagatgaaagccaaggagggctagcagagggaggttaaaaggaggtagatgtcagctctcttggggactctgatcccatcatgggaaatagaactccctgaaccttagggtggagggccttgtactagggtgtcccagactagggataggcctgggcttcaagagacctgagaagcccttacagttatgccctggaacatctatgtgggttttttgttttttgtttttttgggttttgtttttttttttttttttttttttttggagagaggcctgctaatccatccattgtaaagaatctctgtagtttaggccttgtactatagttggcaacttggcttctcaagtgtcaacccagtacagctactctgctgtggacagaaaacttgtgtgaggctgacttagagtgagtaagaacactccagggacagctcagacggctggggaagccaccatgacaacttttctgtaatcataatcatgtaaggcacatgacctttctaagcaggagataggctaggagaggggtgggcttaggaagggtgggtagaaagctctgcctccctgtggagactgaggaccagaaggttggcaaagtggcaaggggatgttgcagctttgaagttgtttcctgcttctaaaagtgaaaggtctctactgagctgaataaatattacactgacttctgacctctcaccttccctgtctgtcccccatccccacttcctcctcttcactttcttcaggaacaaaaatacctgaaggagaagagcctggtttctgaactccctgaaggactatttctcagtagagctcaaactccttccccattgtgagccagcagagccccactctgggtctccacttcaagtgtaagtgctggtgtttcttagagtgtccagagacctagagtaggatggctgaccccagcttcaacctgcttggagcttcccaacttatcctttcagtcagtgacagaaacctgcagcaccaggacttttgtaaggtacccccagatcctgtaaacacctccaggtttacccagaagaatgaagttcttatctgagtacccaggcagcaatccctccaggttttcaactcaagcactttgggagtaatatgaaccacatgtgtagctggaaccaggaagcctcacacagagggtgtgagacctactaagagccagacagatggccaggaagagtgtggtgtcacacaggctcctgctacataagaacaaaggaggaacaaagggtttcccttcacactttctgcacccttcctgggggcttctcacctgttgactgctccatacctccatttgctccctggtagcaggagggagaagagagcatgcctgacactctggtgagctgattcctccctccaacccagtacctctgtctctgtctgtgcatgtgatagggtttgtttgtttgtttgtttgtttgtacattgtgatgttcaagagcttttatttgtctgtgcttctggagctaggtagaagtttgttaagggagttaggaaaatgatgagtgctgccaactggaaaagttattctaaaatccagagcagaataaaaccaggggtgttctcccccatagtctctatattaatttagaattttctaaaacggcaagatctcacttaaagaaaatgtgtgtgcttagagtataaagagccagatactgagtggagtctagaaagaggaaaaacccatggtagctctggcactgaggccataggcattgtttatggctggcatttaaatatgggacttgagatttgaatcctgactttgctgtgtttgggttttttaatatcctctactcttaggagtagagaaggccctggtcttagagcaagtcagttggcattgtactgagagtcaacctccagaaaaaggccagttccttgggctcagatgcctggctgcatttaggaggtgctgtcccacacagaaacaggtatgcaaaggacaaacacaataggaagagtgttggcaggtccagagggcccaaagacttgagtccaatccttggcctttgcccgacattggtcatgctatgtaacacagctgggggaaagcattagctgtcatctcttagatccatacactgtcccctggccaaactgggagagggcctcattccttgctggagtacagaacatgggaatgtgacattgaaaagatatccctgcatgcttggcagtactctccaaaagcctgcctcagaaaatggagacaagcatgacatgatgcctcaattctctttactaaacatgagttgcaaaatgaacaggtgtgctgtgtagaacacttgggaagcatgcctgagtctctgaaaatagctttaacccaagttcaaataatagctaagaaactcaagcccaagctgaatggtagattgtcctgcatcacacagcaagtcattattcaccgtacttcgtttgttcctgcccactatccctgcctactttaccacatttctccccagcttcttgctgcaatcctttacccagttatatcctcatcttgctattcctgagtttggctagacacacagctcatgatgaggcagtatcctcaggagaactcaccatgcctcttttctgcccatctgctggcctttagcacacatccacagttcctactggcactgagcagtgtggggagaaagacttcccctcttttcaatagcttcaaccagctttcttccatccatctccagtcttgctatttgcacagtcaatggctctggcaaggccaggcggcctttccctcctgagagccactgtgggcactgtttgtgtttcggtctctatagactcagcattcacaacttgaagaggctgagacaatgaccccagcagctgcctgcagactgctggctgggaggcacagaccaagagctctgactctcagggatctgcctgcagaggggcaagaggcagggagtgtcaggccaccagggttatgccctttgcacctgtgggctttcccaagcagctgtgcctggccttgaaggatggggaggggggaataatccagagaacttgctcagatctctaatttctactatacaccccctacattgttgttacagtactctcctagctatgctgtgaagtattgggggtagggagttaagggaagtgagggacatgactgctggtttgcacactggaaggagcagagaggaatgaaagcttagtcaggggtctgtccagataggggaaatgtgctttacttttaaggagtttgaacatggaactggctaattcagtttgactgaataaatgtttatagaatatgtgccatgggctgaacatgatgaaaggaaggtaactcacctctctggctcttgaagatctgagaggtaggagagagcatgagcacacaaacaatcattacatatattgtggaaaaatagaagagagacatgaaccagaaatatccaactcgggcagaggccatctatggaggatatgatttacatcatttggagaagcaagcaatagttcaaagataaccaggtctccagtaatgtttttttttatatagatttaaaaaataaacaggtgtaatatgtagaatgtttgggaaatgtttctgtatttttgaaaggtgggtcagaaaggcaaattagctgattgctgagttctctacccacttctggcccttgctttgcttttcagcaaattcactgaaggactgtagaggagaacagggtagtttcaggtctaaacaaatgacccacagctactaatcataattcccaagtagaattagtgctcacaactttgttaccatagctggcctcagaacagggtcccaggaaggttgggctgggattaaccctggtttcccctggagccagagtgctactaatcatgttaaaattagcactctctttacatgcaggggcagagctgctgaactaaggtttggtcaattctctgctagaacagctctaacttctaatcactgtcataaacagggctgaagcagctgctcactccagtctattatcagcttggttggagacagaaatttaaatgacagtaagatgcttagcaaaaaaaaccgaaagtcagtgttaaaaataaagaaaacaagacagcttgtttcattgaaatagaagagttattaaacagccctgaattaattagtgatctgccaagtctggggatagaagaacaggaggtggggctgagagctaggagacttgatcagggaaagaagccccaaggcagtaggaggagctgttgcagtttaccctggctgcagagacatggtggtcttcagaagggagctagcagcaggtttcctgcccatagggacagtcaggctgaggagaggaatttggcacactagtctcaaaatgcattcattagagcttctggactctttcatctactaacccatgcagctcctagggttatcaacaggctgcagagacctcagccctccttctcaccagctagacctgggcagaagccaagtggcatttgatggctggtcagcagctctccgaagttcccaaaaattcaactcagtgacagctctaaccctcattcccaaaggatggtagcaaggtataaccaactctagacgcattgatacctacccagaactgtatggtgacccctagagaagataatctcttcttggaaatggcaattagtggcacttacttggatctccaggtatcagataagcaggatggtatatgtaactctgaaagtccagagtatgcttagaatcttaaccaaaatagttaacctggactatcctccagtcttattatgtgtgaaacagcaatgctaagactactggccctcacaacctacatgaggggcataagaatggggtgatatgtcttaagaaacaacaaccaatttacaacatggaatcccttggaaacttggaacaacacataaggaaagtttcctggaagaatttgaatatggctgggagagggctggcttacatgcacacatatggagggagggaagtggcacccatgcataagccatgcctgacaataatacactggatcttgagcctgtcgctgcaggggcattttctttgctctttgacctccacattctttctcttcacccttggctcccatcacttcagctacctcctggctgtttacccttttccagacttctctctcacaccccattcatcatcctgggtcagatttttctagtcctcactggggagttctttttatccctcacaaccccaggttctccagtggccctagactttgatgtgtctgtctagagatgataaagcctcagaggtctgcaaagtatgtttctctgctcccctcactgtaggtagtgaagggactagatacctgtgtatttgggcccagatgaggttctaaagcagacagaaatctgccaggaatttcacctgcccttacatttttgactagttacttttacttagctttgtgatacctcctctgctgggatgtgcatgtgaacttgtctgctacctaagacaggcttcttggcagtatctgttctccaagagtctgtcttaaggaaaaagataataagaactgatggtgggaaggaaggcgctgcttaatcagcttccttgaggaaaacagttgactcctattctaagactgagtcttggtttagaaaaaaaaaaaaaaaaacactggggaagagaagctaggaaaacaggatgaaacaggaatttctttactcatgtaatgagcaaacactatatggaagaggttggggaatgtgagattctgcctgctgggctgccatctcagtacctcctctgcctctctcttgtgatattgacatctaccatcttgtttcattcagagactgtgagggtgtgaaagggagacccaaacatggtgcaacctgaagacttccaggaaaggtattagagatctgaggtcattaggacagagagaagaagactcagagcattgattcagttcaagagggctaggtccctaaagcaaagtgctaggaggtaacctcttacccagtctggaacacagcatcttgatctttgagaagtcacccatcgacctttgaacagccacttatgccagtgggatggtgaacagtgtttcttaaaaacactgtgactggtgtttactcagagctgtatagtttacaaaacaattcaaatctttgtcttcttgattctcaccacaaccctatcaggtgtcttttgacagagaatttaaggttctcttcctccaaaggttcaataacatgtgcaaggtaacctagctagagagaataagattagagcacagctctgtctccaaacaccatgtattttctctgcagcagttattctcagcaagtaccatggggaattgcttcaacctcttgtcatattctgctctgaaccttcctagggcaccttcccttccatattctgtttttgataacattgtgtagtcaaattgccacatttttattactatatgcttgcattattctgtggtctgtgtctctggagttctttgccaaaactttctgtacaagctgatgtgatcccttctttcttcttctgactccttcttccaccttcctccaccttcccagaactctcctccatatgttcaaggtgaacaagagctggggtcctttcaaactgttcacatacttctccatgagctccaaatgatcagttatggcaaatctttgaaccaagcatgataagatagatcaaaccattcctccatgagaacttatcaaggatcatgtcagctgaaaaaaactaaacaagtactcatttccttctctgtactgctcaggatcagactgactgcgtttccgagtgaaaggcacttgcttgcccaccttgccagcagtctagcaagtaccaaatataagtccagccttcagtgtctgtctcagtcaggagacaggatgttgtcacatacaaaagagttgctactgcactttggtgggtgcagtaagtaggtgctgaaatcaggatttcccactgactttagattttttttttttggaagagagctacacagagggggaaactgagccaaggattgtggggattctgttggaagtaaaatcactattacagaggtaggtagtaatggcgggaggaaaaaaaaaacagcaggaggggcaggatcttaggcatccaggggttggagcctttctgagcaaaaatagggagctatgccaggtatttccacagtgagtccttcattttgcccatgtgcctggcagcatgagccaagggctatgagagataggaccacttgcagcatgtgtgactctgagtcttagctacaggtaggtttcaatagagtctgtcacaaatgaaggcctgagtggtaatgatttgactattatacaaatgctatcccaggagataagccacctttctggatttgggacactgtagcttctggatatggatggacaccctaaatcagcaataatgatagccactgttcctaacataaggcagaagcatcagggatggaacaggcttccttttcctggaactcatcaggcctgaggccacaaagggcagaatgaatggtctgtaagaagaagcaggaagtctctcacctgatctggaaaggtggggtagaataggtagcaagattatgctcttagaagaaaaagcggtggcagactttggggtcatatccagtcttgtagtcaatgaagagtggagtggagggtgaagtgatagcctagtactctggctttttctttcctgaccttttgtttctcctttctcctgctagtgtggactaaaattatgtcattcattcccagaaaacattatgtttaatggcagcacaacatagtattatgtagaataactacaatttgtttcatcaccgaaataggagatttttaaccctgctttgctgctccatttcattcctgcaagagatgcagggtttccctgtaaggtagagaagggcaagaagaaaacgctctctcactctccactagatcaaatggagttgctctgaaaggtgactgcctgtcctcaaggctttcactatagaacactccagaccctccctgtaactgaagttagccctagtccaatcctgctgctacctcactataataaatgaccccttaggataagtttaaagaggaccgtatagcctccaatgaaatgctcaccgggttttacttaatgttctggtgaattttaccagacttgtaataagagggtttgactgaaagtaaattttagaaatgtagtccacttggaatattggaggaatcatattggccatgtaaaactctgtctcctagctgaggataccacccaagtttctctcttggcttcttaactcagctacttcatttgctaattgtggactatccatgaaccttaagatagtaaggttctcagtagtgcaggaaaatagctggtgactaataaagaatagcagcggtggacactctttcttggttttatttctatggttatcctactcatggtccttaggatctgatgtctcctaacatgaatttaacctatcaaggtatagtcgtatgcttatactttattccctttggaaagagcctgggaattgcttttcctgtgctttagcctagtaatgcttaccagagcagcaccccactgctaaggtgatgccaagagagccctacttaggatgaagggagcaataggccaccttttgtggtcacccttagtccagaggatgggtgtactcccaggagcagtttctgtagctttagaacatgctaatgtaccctgattctttccagctagacaagagattcccatagcaaagcagacttttccctgtcctttccccaaagggggttgaagagggcagagccccatgaaggggggcaggttgggtggcaggaaaggcagctgcttgaaattgattgctcctttagtttagttaataccatgtagctctctcagctctgccctggtggcgacctttagataataaagggaattctgggagatttctgacaggctcatgacatatggggcaggtctgcaaggtcaggcagtgtatctccctgcccctggcccagggtaatgaatcttgttttgactttgcaaacctatcccagccagtaccccagaaagaaacagaagccctacctcccaacccctcaaatgagtgcacattttgggacccttcataagtcagagagacaactccaaactttgatagcctatgcaaggaaaagacagacagtggatgttttgctaaggctccaggggagctgatgtggtttccagggctcaaggagaacccacagagaaacctgggaatgaaagcaacagaaacccctccctgctgtgatggtcagtggtcctgggacaggatccacagttgagaaataactgggatgggaatgaacagcagttatatcctgggagtccctgtgtgtcccgtcatgttctgggggctggcaagtaacaatagcactgtctagataggagaggaaggtggaagcgggagaggtccaggaaggaaagcctactccagcaaaagagcacatattagcaaatcctggaattcatcccaaagtctgctgcagagcagtgggtctttcgtacactgcttagggcaggtgggaggaaagacatagtttgctacttaaaagatctctagaacatttgttcagcactgtgtatcattgcattttctacccctaatctctctctctctctcacacacacacacacacacacacacacacacacacacacacacacagacagacagacaggcagacagacagactgacagagagggagagaaacacaaaaaattaagattcctaggccaagaagttcaaatccatgactcttccctgctaagagttagctttttctgctgtagcaaagattcccaggctgctggtggaatcaatgatagatatgttttagagtgttctaaaaactggaggttctagctttcagaggtgttgctctcagggactatgaaggaagatggtattccaggcccctcttgtcagtgcaaagacaatatcttcttaaatatctctgagttgtccttccatgtatgcctattatctgtgtctacattcccctccccactttctatgacattttttttatgtgcattgttttgcctgcatgtatgcctgagtgaaggtgtcagataccctagaactagagttgcagatggttgtaagctaccatatgggcgctgggaattgaagcctggtcctctggaaaatcaggcagtgctcttaactgctgagccatctctccagtccctatatttccctttcagtggatatagtagtcatattgattggagcctatcttcataacattatattgacccgactagtgaaatgaggtccctttattcaaatacatttagaagtctttgatacattctaaagtttttgaggttaggacctcaatgtgtaaatattggctgaaaagacataattgggccatgatccattatccaatccttctggattaagctgagctcccatgatagtgccttgttcagcctctctccagtgtcagagaagcatagtttgatggaatccaggggattttgaaagaccagagcaggacaccatgctgggcaagcaacccactgttgctttctgccttgcctctagttttttggctatgtggactagatctagtttaacccccactccatctttgaaaataaaactgaggttccatcttcctatagagaaagataaataaaggctgagtggttactgttaccccaagttgtctaaaaatacacaggaggggctacaaaaccactcaggctactttcttagcatatatgaagaaagcagagccttgatttcctcccccacccccaccttcttctctcctccctgctctgggccaggactagccacttagcttcgaataacactggagtctctgaggaaaatgacattccagtaacgaagcacatgcagctggtacagcagtgacatctaaattgttcctttggtcctgttattttctataggaaattctccctctcccctcctccctccccctctgcctttaaatctcgtgcataaaatacgctaataacaatcttggtgtctctgtgtgagtgacagctgaaataagaaaaagactaatcgtacctcctgcagtcctgtcactaggagattcattgagccttctccccaccccatcacattccctctcccctcccccattctccttttctctatgttcccttctcaatgagaatcatggtcatttgaataataatattatagactccatcagggtgacagtaggggaaaaaaatcagttcaaacccatgattattccttcaatctaataattatttaaataccagataacttctttcactctaattgaggcctttcagccatcagtgtccccagggcctttgcagtcaccctcttgctcaccttgtgttacctaccaacaagccaggactagctctgaggttggtgctggaatgtgagcttggcccaccatccttctatccttccattatacttcaggtgaaaaaacaaaaccaaggaaagactgggtaagctgtgcatcaaaatctgtggtttagatatttctttctcctggattttagttcattgaaacctgaggccttctgacatcacaggtccaaaaccctgcctctagctatcccttgccagccctctaagataccctactttaaaaatccccacaatctcttctgcagtctaccccagggatgggttgtctctagatgagatctctcttgatatcttatctcaaccaagtgtggtggcacactcctttgatccagaagcaggcagatccctttgagtccaggccaactttgtctatgtagtgagttccagaacacccaggaatatgtaggaagaccccatctcaaacaaaaaacaagaatatcttcagcctcctttactgcagctctaactctgttggaagaggaagggttttttttgttttgttttgttttgtttgtttgtttgttttttgtttttttttcctgctgagagtaaatatgacccagctgtgaaattacatacagcttaaagaggcaggacattgaggacatgagagttcctaagacagaaactagatgtcattcctggttatgacttttgcctggccatgactaggctagagcaggtcagaggaagctgctgcccaggactagaaagggaccattctgattatatcttttggactccttccccttggatcctgaaatttcgacttttggggggatctgtccccagcatcagctcttggtccaagtctcccaccacattcccttttgccatgtgctgaatccaacaatggagataccttctgtcctctagacagtatagcctccaggcagaatataaccagctcccaggactctcattgagggaagaaatgttaactttgtgttacaaggaaacctgtccctgattaagattttgcatcactgtggacaagtaaattttttcctatagagttttgctttttcatttgaagacagatgtatggaagattagagttaccttaaaatgtcctttaatgcccattctgaaacaaagctctcaaagtccagctgactgaaaaagagacctggaaaggggacagattatcctctgccatgaaaaggagtagcagggagtccctaagctacagatgtatcctgccctctttcccctccgctcctcagggtcctgctgtgtgcaccatttatgatattcagtagagcattggtcaacataggcatcactactgccgtgttgagagagaacactgcattgtgctggaaagtggcaatgacggcaatgatggaaagggtggggatggtgaactctatcagcactgtgatggtggtggaggtgacattgatggagagagtgggaactatcagtacctatcagtaccatggtaatgctgggggccacaatggtgacaaggacaacaatgatggagagggtgaggatgctggtgctacccacaggtactgtggcatgatatctagcatgcacttagactccattgtgaagttctatacaaccataactcctgctgctaccaccagctctggggtaagggagattaatgacaacctggaggcatgtgcacctaggccttctgggaaggcaacaatggtgggaggaggtaatcctgcattgagctgaggtggaaatgcctcaccttcgattccttcctggattgccactgactttatgccagctggtcaggaaggtatcagatgccttaggtggctgtcaccagcacctgctgcctggatcctaatcagggagattgtgtcatcagacctgcagataaaatatttagtggcacttgcttttcccagaagcaagtgtgaactctccttggtatcagagtccatgaggaagatgttggtgactcagaagtctaggatagaatgtccctgcttgagaactggggaggtggaagaagaaaaatggtagaagagaaagatcccagcatatgacaactgacttcatgaactgaacacacagagaagatatgatgaaagaggaaagttttactaaaagaaaactcttgtttggcactagtggaaaatcggggctaaaagaaagtactaactgtacagtgtcataggcttcaaccaaactgaggacagagtatctgttttgagaccagtagtatggtagaggacagcaaggagctggaaatatgagtttgtagtaaaggccataaccccctgagtacatgacatggtcagagctgtgttgagaactttgtaacagtgatgtcaaccttgcatggtaggtcccaggactaagcgcatttcagataggtggaaagacagcatcccagagtagccttgtgccctgaccaggtacacacagttgaaggtctacttcaagccaaatatctgagttcttcatcgcagtgattaaccataccacactgctgcttttcactgcaccgtggtagctgccttccttaccctgcattcaccaggggagactgaactttgaccactgaattctgctttagagcaatgccatccatcttggcacataaatctgtgacactcaatatatcaaatctttccatcctttaccacagcagacagtttcttctctggactccaaagtatggcagcagctgctggggtgggtagcccctgggcctggggatgaatttcccaactagtcaccaggaccatgtagttaggtaagaagaaaacagtctgctatagaggtgatctgaaaaagcctgtcttgatcagccacccaatagtacagaaggaatgtggtagctatttaccccagagtccaagaactgaaggacatgggcctcaaggcatcatttcatctggaatgaggacccttacaggctggttatgacagctcagttaacagactcaggaaaatagtaggccagtccatacctattatacaatttgtatgtaacatacagtggaccacgactcctgaattctctacacttcttcctcctctgtggctgcaggccttcaagtcatcagccctgtttttccactctgaatccagcttccagcagcctccctgttgtcttcagagaggctgcattgagactataatatgacatagaaaaccatcctaggtctgttattttcctctgccactgaccttacaactaagctttgccacagggccaggggaatcagagctccccatataaagtccacccatggaaaggaaaaacataagcaagaagagaagtcaggaattcccgtgccatttcccatcaggggtctttatgataatgtaacaggtacctgtgatggtgtgactgcagtaccacattgactttcatgacagccagagagctagatactaccactatcttattatctccttctagcagaaaaagaaatgggacttaaccagtctgaagtcccagatttgcttcaaaggccacatgctactaaactttatcatggaagagggaagtgagatggttaactgtgtcttcagatgctggtctgtactctcaggactcctcatgtacatgagtcagacatgaatgtggatgtgtatggtgggaaggcacgaatgtgcaatgcataaactcagtgccagtgtgcttcagagagtacttttgtcctgcaagcacccacacctggcatggtgacaggcagcctctcttcaaagcttctcttggacggacaatcatgctgcatcctttatctgaagccacctttgtggcagcaggggagcctacctgtggccccatcttctagaaaagagcatgcagtgtggcctccttcaattccccatttagctggagagtttgaggattctgttatttcctttctgcagctcctcttgaggaatttacgtcctgctaccggcctcaggacatagctaaaaataaccacttttcaaactgaaagctgggtgagttaggagcctttgctcctagggccggaagggctgtgacagagtagctaaggtcagctccagcctgtactgccttcctctttccaaggaagcctgggaccacacaaattacctcttgaacactggcagaatacccctgaaggaagaatcaggtgggaccaccctggcacaatggtggctgcagacctatgctacaagtggggaggagaatctctaaatatacaaggaagaacctagtaagggtgatgtcagactagttataaccgagtccagccagactggggagttgagggaacagacaggcaggccaacctctgctaagctacctgggagcaaattctccttcctagctggagtgtttccactcttggcatcagtacacccagagttctgtcagtacttgtcagcaagattgcccaagcactctattcagcttaagaaaggttctcttagatgattgctgcctcttttggtgcagcttccaggccactgctgttcatcctaaaagtcaggggaagcaagacagtccaaagatggctgggcttcctgaccctcatccccttgcctagcatccccccttgctggtcttagtgtatatcctcaggggtcctttctgctccctggcaacttcttggaatgcagacaagataaaagcattcaagagtggagacagagctttgtgatcaaggcccagggctaaattcgcagatgatggaacagccagacttccccagcagtgaccagataaaactgaccttcagacttcttttcctctactgatgaccaagaatttctcaccagaattcctgcctcaggtagtgctgctgggctccaccaaccatccaggctttgagaaaatgcaggatcctgttgtcctgcctgaagagaaaaaggccaaggggttattagatctcagctactcttctcctatgaggcagatggctatttccgtcacagaggaatagtatcacctgccatttcaggggattttcaggctctgggatagtaggtttaagaatctagtcttttacaaatatatctttcataataattttataacagctaaagaccaggacacattctctcaagaataatgagggacatcagtagaggtgaccaacatgtttccctctctatgtatatcagagcatgagaaagtatagaatctcagaagtgtgaggtgaagggagtctgagataaggagaaatgttattggcatatcagactggaatagagggtaccttaaagtaagtgtatgaggaagatatttcagtcctgcactgtcatggactggctgagtgaaacccagtcttttaacctctctgagagaaaaccaatgtcttgagagacctgaaatgaagatgctttctacagtgtaaataaagcatacaaacaaaagcgtattatacagcataatggctaaagaccaatgataatgggattcccttagcaaccttgggggtgggagggatgttaaaaatagaaaaactgaaatgtagcaaaagaaactcatagcaccagctgggtttgagaatcccggtaaagcaatactgttcatatagaatttacttttggtcttccatttttcagaaccatgtgagagctgatcttgaaaagtggacaaatacatagaggagctgtcccccagcctcacccctctagggatggagcagaggaggttctatctgcgggccatgcaggctgacaacctgtctgtggttctgctctcagtggcctggctcctgctagctcgtgggaccacaggtatgcctcagtacagcactttccactctgagaatcgtgactggactttcaaccatttgactgtacaccgaagaacaggggctgtgtatgtgggggctatcaatcgtgtctacaagttgactggcaacctcaccatccaggtggctcacaagacagggccagaagaggacaacaaggcttgctacccacccctcattgtacagccctgcagtgaagtgcttacactcaccaacaatgtcaacaaactactgatcattgactactctgagaatcgcctgctggcctgcggaagcctctaccagggtgtttgcaagctcctgcgactagatgacctcttcatcctggtggagccatcccacaagaaggaacactacttgtccagtgtcaataagacaggcaccatgtatggtgtgattgtgcgctctgagggggaagatggcaagctttttatcggcactgctgtggatggcaagcaggattacttccctactctgtccagccgcaagctgccccgtgaccctgagtcttcagcaatgctggactatgagctccacagtgattttgtctcctccctcatcaagattccctctgacaccctagccctggtctctcacttcgacatcttctacatctatggctttgccagtggggggtttgtctactttctcactgtccagccagagacccctgacggcatggccatcaattcagctggagacctcttctatacctcaagaattgtgcgtctctgcaaggatgaccccaagttccactcctatgtgtccctgccttttggctgcacacgtgctggggtggaatatcgccttctgcaggcagcttaccttgcaaagccaggggaagctctagctcaggccttcaacatcagcagcgacgaagatgtcctgtttgccatcttctccaaggggcagaagcagtaccaccacccccctgatgactctgccctctgtgccttccccatccgggccatcaacttgcaaatcaaggagcggttgcagtcctgctaccatggagagggcaacttggagctcaactggctgctgggaaaggatgtgcagtgcaccaaggcggtaaggaaacaccatgtgctttgttcccaatgtctctgttcctctgcaccttcagtttttggacctgtaagggcctgggatagataagaaagggtttcagacaatcagatgataactactgagtatacagcctatatcagattcttgggatgagtttggtggttctttaaatcaatactaatgcataccctgtatgcttacagtgcaccagacactgctcttgctgcctgctgggccacacgactaagctgcatgttctacatgagcttacctactagtgaggcaagacacataaaacagcttagctggatgtggtggtgcacacttggaatcttggcacttggaaggagtaggagcaggaggtatccacggtcattcctttgctacatcatgagttcaaggctaacctggctagatgagatgcttccagacacataaaatgattatgcctctcaaatggcaaattttctttaaaggaaaataaaacagagcagggatcagccatagagaattgagacaatagtatgttgagcaatggctaaataagggaaaggcgtttcagagagaggcggcaagtgcaaagaactttgaacatgcctgagtatcagataaacgtcaaggaatccccaccgcttgattgaagcatatgagagagggtcccacagcatacttgataagaacttaagctttgacatctaatcaatgagattaaaaataagttcttccacctgtatcctatgtgtccttgagcaagttatgtgctttatttgagttttgaggtttttcttcattaaaatagaaataatgttattttcttttttattatgaaaatcatgttatcaataatttattaaaataaaatgcttggcacacattaatcattcaataaaagagcagttaggattaccactgctgatcatagtaaagaaggactagttatttgcctagtttatcttactttcataaaacgggggagtctggatttaggtatctcttgtttgctttatagcactatagttctatgaacaaggaccctctacaaacaaaagaagtagagaggaaatgaaagggttaaccccttgcagcatccactctggttcccatggcccagagcaggccttgtcaggaggaaactgctgattcctgcttgcctttctgccaaagttaaaaggaagaggacactgctctgctccagtggtggtacagagagacaagtcctggctagtagtcatgggacatcagaaatactgagtggtgactagaaggacaaatgctttgtagcaatggttctcaaccttcctaatgctgtaactctttaatatagctcttcatgttgtagtgaccaccaaccataaaattattttgtttctacttcatagcttaattttgctactgttacaaattgtaatgtaaatatctaacatgcagtgtatctgatttgtaactccaaaggggttatgacctacatgttgagaactactgccttataggaaacaactctttttcttgtcatcacttggggtaataccatttcaagcaccaaaataataggatgtgcaaaatgttggtctccctggttacctatagtaaaaggaccccagaggtagaagctaaagatgctttagtgacttttgagaaatttaaaaatcaatgagaagccatggccccaaactttaacatagtttgtggactaacatgtaattctcgggtataagatttgaatattgcttccacaaaaagcgtgagaaagggacccaacactccaagaatatcagttacatgtgaagggctgttttgagcaatttattacctcactatatccatagaaagtaaatcactagttatcataccttttgtagatagaaaaaccaaagcctcactggttaataaactgcttaaattcatatgactgaactagaaatcagaaaaacccacagttgacagcaagagcttttcactcctgccatcatgtctcagaaactggtttaggttacaactctgtaggtctcccagcctctggaaaagtagtgggaaacactgaaaccatgaaagcaaactataaagtgttttgacaaagacctgactcaactcttattttatagatggaaaaaactaaggcccagtgatggcatgtaacaataaagatatgcagctaatatggtaaggacagggctaaaattaagattacctaactacttacagaacaagagtgagaaagagacagccagggtagagaacagtgactagtagctgcctgtttggcactgcccagtagcatccaggaataagcagctgacttcatacaacagaggaagaggagagccctggtctacagcacttggcaattcccatggtgtaaacactgccatggaggatgacagcaatgactgtagatgcacacatagacgtctctcacaagctggcactagtataccatggcttcttcccttccaagctacagtgtggaatctctgccaccagaattcatagtcattcttactctaaatcttggtgttctttcctgtgagtgcttatgcttgtgtttagaaccagtattcttgccagtagtaggagtagcagctgtccacaagtaccaagatcacagagacctgacctggttcctctcagaactgaggagggaacacaagactgagaaaaaaaaatgtatgctagtttattaaccaatttttccgaggaaatgaagcatcagatttctcctccccgaagaagatattttaaaaaaaaaaaatcaaggttgaaggaagcttctattctgctcacagctatatcttttgtttcctggaagctttttccagaccaggatgcaacagctcccatagcactcagggtcttttctggtccagaatctgtggccttaactgcaagatttcatgctggacagttagctggcatgtcttggagcatcaaagcacagtctcatgctaggctctatgcaacccttatccttaagagtcatgcagttccctcccacctattttcttcccgctcagagagagggaatgagggaataagggagagagagaggcagagagagactggctggacctactgtggtcttttgaaacttgaaagcccacccctggtgatatacctcccccagtgccacacttcctaatccttcctgaacagttcaccaactaggaatcaaacatccaagtatataagcctatggtgtgtgtgggggggggggagattaacattcaaagcacaacactatccatccaattcttcctttgacagcttcaaaagcggatgttgtagaccacagtggaatcagtcaggacacaggatgggaatgagtcttttcattctctgcacagcaagttttctcacttattcaagacagccttctttcacagtgactcagttcctccttgcccacctctaatcccttcaaagtttgatataagaggaaatctctttgaacacctataatgtgcaagagatagtgacacatatcaataaaagtcttttacatacactgtttcatttaatcctctatagttctttccaaagtggtaggggatatatcattccaaatgaaaaatctaatatagattagagtttccatcacagcttggtggtacaggcctgtaatctcagctactggggaggctaactcaagaggattacatgttcaagctctgcctgggcaatttagtgagacctgtctcaaaaagtttttaaaaaggactgaggaaatagcttggtgacagaggacttgtctagcattcaaaagaccccagattcaccccccagaactacaaagatggaaggaagaaaagaaggaaggagggaaggaaggaaggaaggaaggaaggaaggaaggaaggaaggaaggaagaaatcccaaagcaaaagatgatatccaatattaccatgatgcttaccatatgcccctcggatggtaggtaggtagtagttatagttcagtggcttaaaattcctcatgcctcaaggaaaaacactctacagcccaagaaacactagtttgctcaaagaacaaacaggtaacctctctgcctgtagaatcttacaatgttgcctttaggctgaatatcctttgagggaatcctgtctaaaatagacagatctgcacagtctgacttggtctaaggggacatgaaaagaaccagaaggtgagttcaagcagtcggctttatgacttgagcctgactttcctggcagaaaggtaaaaagtagacacatggttctttctgagagagtaaagatggctaatcattcacaatctggtcccatgggagtcaagattgcctatgtgagccatgttagatccttccttccagacctgaacctctctgaggcctggtgtcctcaggatgacagcagtgggtgggagccatgttagatccttccttccagacctgaggtctggtgtcctcaggatgacagcagtgggtgggtagtctaaagtgatccttctactgtttcaatgtgatttactccagttttttcctgtccttccagcctgtcccaatcgatgataacttctgcggcctggacatcaaccagcctctgggaggctccactcctgtggagggactgaccctgtataccaccagcagggaccgcctgacctctgtggcctcctatgtttacaatggctacagtgtggtttttgtggggactaagagtggcaagctgaagaaggtaagagttgggggcctggcgtcttcagttaagggactcatcttggaggtagtgatcaatggagacttaactatagtcagcttcttgttttcttaagggaagggaatggaagaaaagatagggttccattctgtggtttatcttttaattgtttcctccagtcacccatcagtgaatacctaggaaacacaaatgtatttcagtgttgccagacattgagatattgggaaggtatttttcctgaagagttaattcccaaattaagtagaacttttgttgtttgtttagatgttgttgttgttgtccacactgtgaatcatatgtactacaactcctacctgtgacccagatattgtttataaactgaaagtagttggttagagcaggttttgggtcctaagagctttaatggtggatgctggcctcaggtacacgattggtgcctagggacaaggtcatttacctacctttccattgaggagagtcatgtagagtgccctccccactttcttacccaattctcagcagccagcaggaaggcaacatcttccaagactccttgtgcaactgtacaagctggagggaagaagctgtctgggactggcaacaatggggccctctagtgagggaggctgaagccagtaacttgtacctgcttgttgagtgcttagggtgtggagaaggagcagagtctggttcattatgtgggattatagtagctacattcttagtccctactaatccccttttccctgcaagcttgctctcctgcaactcctcactattcctggcacctgtgaatcaaggcacaggcacgattttgctgcaccttatcctttgatgttgacattaccaggcttccttctcctaatccatttagagccctgggaggttgttgttggggagtgtggaagaagagatctgggagagaatatgagggagaatttccattttcttcttgttcagatttgctgtagagaaagtggaaagaactagtctgaattatgagaagatagaggactttccaaacttctctggtctttggaattccaaatccctttgaccctttctttgctcttgggaaatgttcctacttgtttctctcttgcaccaatactctgccccacagctatggacctgacttggctttagcatgtggaagagagggtgagcgaggtcttatcgtttgcttgcctaagctggggcaggcaggagtcattccctgagatttgttcactgagagaggagttactccctgaagttgggaagtagtatactctgctagtcacatctctgcttagattgccagagtctttctacctccttgcttagcaaggttcccatcatccagctgggtgcatttgcctgacacatgggacttggacaagggggaaagttcgaatatcacctaagcaatcctcagcaggccatgtgccatgttcttagacatctgccctatgaggcttctatttctaatgtctatcaaaggcagtgtctttctctaaaattgtacagaggtgtctgtggggtggcagaagtggctgctaggctagtaaggaacttacccattgttccctcacttgtagttgctggtctggactctgtctcctttactcttttgggagtcctattaaaggatagactgtttatactaattctctttaagtccatcaccaaagtttcactgtaggttaagcctaacaaagtagaaccagccctgcaaaatagagcaattttctgaaaagccttgagatcatctagcccactactttcattattctaccgatactcagaggagtaactgattacgacaaagaaataaggctagttgtttcttaccttgacccccaaacttgtcattcttttttacttcaagaaacagctgtggaacagtggtattggggttgagtgattttcagatccagagttgctacagagttcattcagtcaaaggctactgtctctactttttctggccttggacataaactaggaaatcagtattactatgtaaaagaagaatggcctacccagaccccaagggaacatctactgaccccgctagtattcatgcatctcactcattacatatctgagattgcttcacacacacacacacacacacacacacacacacacacacacacacacagagtggtccaagaagttttctgggccttgtaggatctctagcagactagtcactgagaaggtaaaaggttcaagggcaaggctgcaggcatagctgcctacttcatgtcacagcttgtgagttgtctatgactttttactgtgaggtgctgtgcctttggctgcttctatgacctcatgatatccccaggttttcctctgagcagatcaccctttcctccacccacactactttcaggtacttgatacccatacctagctcctagcagcctcccacttacccagccacttatccccaccctctctagagaaaaagcccatgaagaatttatggaatgtccccaggaaattctagcatggttctggctccatagctctttcaacacaggaaggaaaataaagaaaaaatagctaagagtcaggcaaggggagggaatctgggtgcgtcagagctactcacttcttccctgcctggccaggcgtctcccagacgatccaatcctcatctacagaggctggtaggaacaggatgtccctgagtggggaagtgaagaggaagtgaactcaccaaaaagggcataaccacaatgtgatcttaggtgcttatacacataggaagcccaaagaccaggccctcctcttctggtgtaccagcaggtggaacaccggaagagtagaactgagatctcaaagccaagatatagtacatgcaggactaagaactgttctttacatgatgggaaacacaagtaaagcttcaccacagggtgcaacagctcaagcagtgggtgtgggtctagtcttcaaggtctcataatagaggaagagtaccaggttctgctttaaaagagtgaattagagcctggtatggctctgagcccaaagagaaactcaagaaaaggatttaggattagagtccagccaattgtatgttacaagcttcatcaaaatcaattagtcatcaccatagaagcagaagaacagcttccagatcatgagcagcattgactccacgttatgagggagataatatcataacagagtgttaagaaagcaagtatgagataaacaagggcatcagggatgtgggaatcatgctatgttaaatgtatttctgcaaggctgaaaacacaaggaaaagaacaaataaaaaaataaagacagatctccagataatgcaatttattgagcaccttttatgttctagcaactattttaaaacctttacatctactaaccccttgaattctaatgtagccactctgaggtgggtactgttatcaactccattttgcagatgagacaagtttatgtctaagcccagatttgattgttgacatgcttagccatcaagctatggaagacaaattaggcttagtcaatgtggccccaaaggttgatatgtaggagttgctgctgcagaaccaccttttctcataacatagggaaggagttgttataaccaaactatcttacttgagggaatgaatacctggtcaatagatgtatccagtaagaggtacagtagaaagactaactctaacctaaccctaactttagccctgcatctaactatagagtctctcccatggtgacactcttaccctgaagactgactccttcaatggaacatgaatgtggtgatttgaatgagaatagcccccataggcttatacatttgaatgcttggtccctagtttgtgggctgtttaggaaggattaggagctgtcaccttgttgaagaaggtctgtcactggaggtagactttgaagttttaaaagtcatattaagcccagacagtctttctttcttcctccatcttgaggataagatataagctctcatccattgctccagcactctgcttgcctatctgctgccatacttactgtcatgatcatggactaaccctctgaaactataagcaagctgccaattaaatgtttcctttgatgagatgccttgatcatggtgtctcatcacagcaatagaacagtatctaagacactgtgacaatggaagacaggctatagcagattattgttgggagccgcgcccacattcgccgttacaagatggcgctgacagctgtgttctaagtggtaaacaaataatctgcgcatgtgccgagggtggttcttcactccatgtgctctgccttccccgtgacgtcaactcggccgatgggctgcagccaatcagggagtgacacgtcctaggcgaaggagaattctctttaatagggacggggtttcgttttctctctctcttgcttctctctctcttgcttcttgcgctcttgcttcttgcactctggctcctgaagatgtaagcaataaagttttgccacagaagattctggtctgtggtgttcttcctggccgggcgtgagaacgcgtctaataacaattggtgccgaaacttcttgcgcgcgctcaacaggccaggaagaacgacgctgctacaggatccttctgcacacgtttattcagtcctgtttcttcttttttatatctcccttgtttatatctcccttgtttatatatctccctcgaaccctgggcctctcactcttttatactctcagttcccatccacgcacagcaggccacgccacctcaccaggcacgcagcttcagctaatcagtgcagcaggggcaaatctccaccaaattggattcacctgtatcctggtacacctgcgcagcactcaagatgtttgtgtcttatatgaggaagtcaggtgcaagtcatatgacttagctgcagtctctggcgcctttgggactgccgccacacccgctccccacaattcccccttttttcttttttggcagagagaatgtctgtagatagccccccgcagccatgccccttacccgtccttgggtgacaaacagcattggtttgatccctgtcttaggttggtgacatgcccagggagtcttatcactgactacctctcaatcatgccaagccactcctggggagattgtgttttgcttgtggcaggtgcatcaaaaggccaggatgttgataatctatggccagatcttaattgctgcaagcaagcctcatgggtgaaggtagaggtctgatccccagtgtgcaagcataggggccctacacaaaaccatcccttaggctcatcacccagagaggtcttggccagctcccgtgtcgtttttcctgggggaagggaactaggacactgaaccttcatgcaatcagacgtgccttccacaggatgccaacagcaagctatcctctgtgcagtgcttagcctcgcaccccacggcataacgcagcataatttcttttagagcggcaaaccgaatctgaggagattgtcccgcctccactgcagcaaaagcctatgctaccatggcgaaagtgcgggccgcacactctgcacctaacacatgtgccaaacacacaacacacacactataacaagcatacatcccagggctctcatccccgctcatcttccctgaagcaagggatagatggccagcggggctatctctttaaggggaattcagggatcaaaaagcgtggaaaaatttgaacgtcatgtcgagctggtatcggcttctggaataccgaaaggatctctcatctcggctccatcgtttgtgcttgtgggatcatccaccacatccacaggggcaactggatcaggagcctcattcttgcagcgtctcaccaatctctccagcacccaaagaggttctgtctggtcctgtggaaacacacaaacagaccctctcgcccacatcaacacctgatctgctcgatcctctccaaatctccagacagaaggtccacctacaggtggctgctgaggaggcatagggaggcggcacaaaagctaattcgccttcctcctccacctcggctcttttattttgtcctttctgtccacctgataacactgtctttctttttcctttttctttttaagcccttctccttttccgacatactttcttgttgctctgtaaggattttctgacctgtcttgactgcctcttgattcaaacagtaacagagtccatatatcagaacaaacaagaccaaaactatcagacctacccacaaagggtcaatgggagaaaaaagcataactacacagcgaggatctattgatcactacactgaggttatcatagttccttaacttgtccccaaaccaggaaccttaatttgtcccaaagcctgcttcctggcaactttatatttgcctctattttatccgaggtccttcccaaactcctgggttactttgtgcctacttcctggcaactttatgctcacctctattttatcccaggtccttcccaaactcctggggtcgcaagtttcactcactgcgaacttaccctgccggcaaccactgactgctgaaagttctgaactcggtgggggagtcggttccccgtacgggccaccaattgtcacgcccactctcgaccagcaagaacgacgtgaccaccagtccttctaacagcagtttattccgtcctcatctttcttctttctcttcatcagtaccgttccccagctgaagagttctgaatccacgccggatccttctcaacagtctgttttacgggaacactttattaaccgctccttcccagtgatgcagttctgaatccttcctgtagcagggggtcttcgctcatgcctgaagatgtttcttttcccgggtttcggcaccacttgttgcacgcgctcaacaggccaggaagaacgacgctgctacaggatccttctgcacacgtttattcagtcctgtttcttcttttttatatctcccttgtttatatctcccttgtttatatatctccctcgaaccctgggcctctcactcttttatactctcagttcccatccacgcacagcaggccacgccacctcaccaggcacgcagcttcagctaatcagtgcagcaggggcaaatctccaccaaattggattcacctgtatcctggtacacctgcgcagcactcaagatgtttgtgtcttatatgaggaagtcaggtgcaagtcatatgacttagctgcagtctctggcgcctttgggactgccgccacacccgctccccacagattatgggagcaaagacagatggtcagcatgccctagatatggtctttgcagttcaagctgggttgagcctgcctggaacatggctgaaagtttttcactgtcagaaagaggtatttggtatatgcagggcagatctaaggtgctggggggtgctggggcaagcaagacacaggggatgggatgtatggtatcctagagtctgaacactgtactctatgatgatgtcccctggttagtgtaggctgggagttaatgtccatgcaggtagaggaagagttggggcagaaactagaaactcatttcagatatctttctgactccaaggaagagtggagtatacagtctaaggtaatagaatcaggaactgtgctgaatcagaaaagacaggggtgtgtggggggagggactaactcaagttttaggatgttgctcaggagcttcctagcattcccagtacctagaactctgtccacctgctcaacctaccatttcacatcctaccatattctcttgcagaagctaaggtggctttctgctttagccctcttgtcctttggaactgaggctgtaactaggagtgagtgctgctgtttctctgcccctggccttgcagaaaacatgtctattgcctagtgcttgtgacatatactttaccctgtcacttcaaccattgctgccacacactgcaaacgtctgaccccactaccagataaaatatctcacattagggacttggtaagcacacctcaaatgtactgggtcgtactgtgccaaatcctattgcaataattggaatagaatcagatgccaagattgactcctatggctgaagctcttatagagagcagctctcatgatgggtgggcaaatccattggctggcagtggatgagaagtcatggaagcagaactcctactgaattacaggaagagaatgatttctggataatatttggaagaaggagtagaggtgctctgagacattagctaataaggcaggggaagagcactccctgcattgcctagagactctagaatagcacacatagacatctgcctcgcctggatcaggtgaaaactttgtagtaggcaggtgcagaagctcagataaccagtttctctagtactctagcagccctttactttttgactcctgggacatttttacaaattcactgagactgtccaatttctagagagggccacgtataaagtatatttataagggaaattgtttctatgttttccaaagaatacaccaaggtatggtatctagtgtccagcctaccagaaaccctgacatccctaccctatcttcttgtaatctcataattgagtcctcaagcaaagccaaacaaaatgtgaacttcttgcattagcaatttagaccttgaagagtttatcaggatttcttcccagagttagtactcagaggtttaataaaagtaacatgttcacatttatacacccttcacctcacatggctatactgacattcacacagacttcctccctaacacccaagttcctaacctgctacttcgctgcctttgttttgtggggtcactgtggcagctgggaaggcctagttgcatgaaaatctgggaaacatgactttattccttgccaatcctactgaacaagaacaatagccactggttcctcagggtggaaatgattcacttctctccctgcaggaatccttgatcctgtaaacagccaggaataggagctgggaggtagttccagagtccctagtggttatcctgacactagagacatctgatttggtcccctggcatcccagaaatgctgagatatggagttgtggtgggcccgcagatgttctctgacctccccagagtgtgtatcacagaggtggggtactgactccaaagctcactgccaaatcactgtaatgaaactggctccttgcccagactcctgccaccaaactcactgtttgttttgttgttttatagaccccttgggtttagaggactggtcttcccaaagctgggaaaagaggcatttctttggcacaaggaataagtcatacttacagataccccatatgtatgtcctcctgctcagccatgacagatgtaggcaaaggttttcaactctatccagactcccaccaggccccagggaaagggcttccactctcccagaacccttctgaaaagggaagctaagtgcatatttatttttgcatcttttgtgcagtttgtgcacttcaattctagtgacccctgcttgaggcataaaacatagtgttctgctggctgttcatagtccaagagtgagtcgtgaaattctggactttttataggaaggtgaaaccaggaaactatggcttgagtcaggaggttggagatgaaaattcaagttcatagcatgcagatgatccaaatatattctgtagaattcactacaaaccaaggtgccaacttgtaaaagccacgtccccagaaaagtgcccaccacatacatacatgtcctgtaggcaactaggtcttgagtgtctctgtcagcagggacttccaaaggccagctgctccagccccttccctttagggtgagactgatgtacataaaggaaactctgtggtttcatgtgacctagttctgaatataacctagcagcaatgagacctctgaattccagtgacctgtcctgtaaagcaaaggtgattcttacccttgctccatgaaatggtaatttgttcttggaatagtatttatggaatgttatggtggtttgaatgagactgcctctcataggctcatatatttgaatgtttcgttgctagtttgtgaaaccatttgggaagaattagttggtgtgaccttttaggaagaggtgtgtcacagagaatgggacttaggtttcaaaagcttatgctatgtcctctctgtctctgtctgtgtctctctgtgtctctctgtctccctcatctctcctctctgccttgttaagatgtaagttctcagatactgctccagccttgcccccgcctgcctgctgccatgttccctgccataatagtcatgaactgtaaccctcaggaactataaagtccagtaaattcttttgatgttgccttggtcatggtgccccatcataacaataggtgtgtcaggaactaggtaatatagtagtgactaaaactgtcaaagtactcatcctaatggagattccatttagtgtgggaagacagacataaaccagaggtgaacatgatctctatgtgtgaatggtaaatgctaatggacaaaacaatcaaagaaatgatttgtgtaaagcatagagtgcagaacttggcacagtcacaaaatgtgacctttttcttttgttttgtggaagaaagtagcaacaaacactttggatatttgtcataagaaatgaaaagatagtatatgaaaactttttaatagtgattgttacagaagagttttctgtaattgtgagcatctttgagacttctgtcaaaatcctacttttccttggtttcctgcaggtagtgacactgtcacatcaggcttcctttcagtgacacatttgcaaggtcagataaaggaagacactcttgtcccctgcccccagtcctgagtcatgggaaaaaaaaattggaagactggcccagctgagcccatctaatctaaccctgatggactttggcatctagctacattagtcaccagtgagagcaaacaagctgtgctggccctccctggggtggaactgcaggaagtgaggctctatgtctgctgctttgcagaattaaccaaccaacactgttttctctggatgtgtgcacccaagccaaccacaatactgcggtgccgcacagctctgccccacatgaactatgtgatgttgggagcagtttccttagctagatcacaattgtccatcttgctatattgctgtgagtgtttgaaggatgtagaatatctgacagagccttgtgtagagcttaaaggaactccatgaatggcagatgttgctgttggcatcatcgctgctagtgttgttttaggcactcctatactgttatgtttttccttcagaggtctgagttccttttgtttctctcagctcattaatcttacattttaagatgttcaagaagagttgggattgttctgtgttctgctgcatatggaaatgctccatacattttctctggtcatatggctaatcaagggaagatggggacattggagacagtatcacaaatattttagctgagatgaattacatgcatatttaagtcagtttcataacccatgatattcaagtgaaaagctcctagctgttggaatctctagggtttttttttttgcttgttttttgtttgtttgtttttttttcccgtgagcatactttcgatccagtgagatataaggcagagaggatgaacctggaactctgagccctcctagtctatcttaatcctatctcaaattttagaaagttctttaggtttcaaggtggagaagaggttataagaatctgatgccaaggtatcccactcagacactacactcttactcttctgtattccatgcaaaaactagtgctgcccactgaataatgtccctttccctggaaggagacataacatcaacgggctttatttaatcagattgttccctgcttaagtggtctggggtttgtgagcaagcagcaaagacaagggtaaagactacagagttgggacttatgggagagggggagcagaactcttaaggagaaggctgatactatcaagcaatatcagaagccttcttatagctgtaaatggactttactcctataggggacgctaaagccaggtttaatctagagatcctggacactgatgtgcatatatatatatacacatatatacttacacacacacacacacacacacacacacacacacacacacacacacactgttactggagaaggtagccaggccttgaaatgttggatgatctactcaaactcacacaaggttaataacaaagacattctaaattccaggtttgggtgtctcatctttgggactcttctctaagtgaaagaactatttctttgcttttaacattaaactaactgctgcttctccatagaacacaaacattttctgagctgaatccaactttggtctggggattattctctcagagcaggatccacctagattttgccaggcttgatcatgtagcttgctctagagtgaactgcattctttacccttcattctatatgtctagaagtctcaccaaagcctgtctagcaggaaggctactcaatcaccaaatgtttgccctggggctgagaggttctgacaagtcactgcagtgggactctccaatcatccatgctaggcttcactcctggcaagcaactctgactactgtaaactagtcagctcctgtgtactaaaccctgatctgagtatatttcaaattatgtttcagcaactcatatcatgtaagaattagtatgtccatcttacatatgaacaaactgagtgaggttccagagaattaataactgggtttctttgctacaaagcagagaacttagatttgtatccaggtctttataaatcctgatgtgggcttttaaccactggattttaccttctcatgaccttctttaagaacctattattccagctgcagtcttgttgtgtgacaagacttttcctggggagacacaacatgcactactcacccaagaaaggaatcccagtgacagaccaaaacatggatatcacgaagtccaccttggtgaaccaatgatatttcagagtttatttataagagtaagggttaggggttacttacaagaacagaaatgactcatgggtggtagttcacgaaagctgggaaacaccacacagcctaaaggcagcttaacaggttggagagtgtcatttccaagtaattctgggctaaacctcttccagacagtttcgatggtgaactggtcagcttcaggtatttcttgaagttattttgagttgtttaccttcctaattaaggagcttccctgtaggatagaatgtttcacacacacacgtctccctagacttttcatacaattgcaagaagagagaagaaaggaaggatagataaacattttgcattctgtaaagcagaggtgcccaggaaaccaggaacatggcagctgtcagctcagcacatgctgtcttgtttcactctcttcaggcctcttccttggactcacagtgggtggggtggcagccttttgtgctgcacacaatccccagctcacttccctttctctaggcatcactatttgctcagagctttctgaaggggacacaaaagagggccactgacaaagccaaaggcttctgtgtagagcaagggtcctggcctgaacccatgcatctctcagagcccccaggttcttcttcaaagatattgtttagggtcctttatgtgccagtcatacccattcagagatggctgagcaaaagtttcagtgtgggtgaggaggacacagaaaaatggagtcattttgatctagcaaattggaagggacattaatgcaatagttaacagcagaccactgcacaggggatgggcacaaatgttcaacctctgtttatggggcttacatagttctatcaatattgatgcctgatgcctttgattctgacactaatcattgctatgagttaaatttgcagctctataattatgattctattaatagggctttaagctaagtaccaccatgtcatgtgtctttctcatggttgaaaatggcatccttggaactctactaatagggcacacctgggatttgccaggaatgatgtgaaaattatacattctatatttgtactgggccttttctgaaataccagtgagcaatagtgaacctggagagggggaaatgctatgcagagctcaggtagcagccaggtgtctgctcttggagtcttaggacaccccagcaaaaaacagactgctcacaatcaaacttcagctctcacgaaggtctttacctccgtctaatctgacattactcagagactagatattactgtggtaatttctttttagacttgaacatggctgtgagaagaccaatgtttcctcagagactgaaaatcattagccatatcttactgatagtctcatctgtgatcactttcaactggatggctgggacagacccccacccccacccccacagccaattccaacccatctagcgagttctgatctctgtagacacagagaatttagccatctcatttatttaaaaaaaaaaaaaagagctcattgtgcacagggtgggtttgaagagggtgcttgaggtcctgttcctggtagacttgcagtaagttgagtcactgtgacaactgagctttcactgagaagggcatagtcctgccctagagacactacaggtctcatttaccctccacctaagtaatcatggttgtcatgcacaaggattatctaacctctttctgatagcatctgtgtgatgacccggtatcacttacaatattaatgtgtccctagtgacacaagggctacattagccctgctcttttaacctccaaactgaaaatattttttcttcccagccatcaattattgattttttttcttttgtgttttgtgtcatctcaagaggaccatgatttgagttcaagttctccgttctatttgctgaggatgtggccttgcctaagttagttgacctctgggaaatacagagtttggggttcacctctttagagggactgtcagatctcctcaggatatctgtgaagttgaatgaagatgcttagcacaggtccttcctgccccctccctgccccatctttcctttgctttccattccttcaggaatgatgagcagagggggaacttcccagaggaaagctggcaaagtacaatctccagctccttcctcccagcacactaaaatgctttataagctttgtcatttttcttttcagtgggaccagaatctcagataaactaaagccaaccccaagctcagaaacatctttttattgatcaaatctggcatctttgaaactttgctcatagaatgagatttctgttgggtcattgaaatttctatagtcatgtttctcactgaatatagaccgttaagtggtccctttactattgaaagttggcctggtagtagacaaatcttcaaggacttgggaacatgggtaaaagtatgtgcacatcagcaaaaattggacactgcttctagtatcctctagtctgtaggatttaagtacttctattatctgccactcacaccttacatgtctaccattcttgtaaatacatactgaaaaccaagtgtatactacaacagcaaagggtgagtaaccagcattagcatagaacttgtcattcctcaatataaaatctcagaacaatgtgcatagttgaaactttaatacctgcatttttatcatttatcacacaagtgttttcccatatacacagtgttgagtagaggtaggatttctgtcagataattgtaggagttgctgttggatttagtccttttgatactggaggttatcctggtgcagggcaagtccacagttcctatcatgtgttcagtcctgtatcccacacggcaatactcactttattcttttatcttgacactttcaaagtcttagctagaacagctaggatccccaaatctgacttatccttaagggttgtattaggtaccctgaaattccctcttacctccaatctttccagtaatctaactgcagaagccataagctgtgggcagcttcagtctcaggcagattggtggtatccccagaggaatggctacagactgaaatggaggaaaagcttgcccaacctcccacaaccatcaaatcaaagaaataaaaaggctgtctccttggtgcctccctgatatttatgtctgagctcggcagacacccctgggttgcagccagtctgtttcggcattagtccattacgctttttatgatgcatgttacccaccccctcccctacccctggaacattttatgactgtccttttcatttctagaaagagcttcatggaatggcagatgcctgcatttccccactctttggggagctattcatggcagcctgtcccaggccataaacaacaggagataaaccacagccactggcagccaaagccaagtatcaagaggttcagaatgcggtgaggaaggagtttggtggtgtatggaccagacaaacctggggacctgggtgtcatgcccttgacaagagagccagggccattataccaacattgaatagtactactctccagatctcccaaaggctagagggaactcctttcattctccctcacactagggcccagaagcctcccatcctatcattgtaatcagaaccaatgcaatttacagtcaggagaagagattcctttggaattatctatccatacatgcatgcctctcacctcttgcccatgcttctacatgctgaaacaacttcttcaaagtttctctgctttttcctacccactctcattgcagcatctacacagtctccttcctcctttcatattcttccagtactcttctctctgacagacaggaccaaatcttaccaatctatcacacttcttctggatcattaaaacttcaccctggactctggtgtcctggcagtgatatttatttatctcagctcttgagttgcacacataagtaagtcacttgtgacactgtgagagatagcatccagggttaggtgttctgtaaaagatacccctagaagaaaaccaacttctgaatgaataatgagagattttagattctttcaaaaaacatagataaaatgtgaaaaatgagtggaaagagagactgtgagggtaagcaagagcagagcagagccctggataatgagggtacaggataggtttcttcctattgagcaaccttcgtgacagggcttcagaggaagtggagggggatagtgttctttcttttctccttatttggttttggactccacatcaaatggaatatatggatgaaactgatgggaatttaaaatgtgtgtacatatcagactgctgaagacagtagctattatactttgtgtatgttttgtagtaagctgctcaattatttattgggcactgagctttaatctcataaacctgccttcaggcccccaacatcaacagcctgagcactgcataaaacctccagcctgctgcagcctgggccactccaactagcaattgttctcacaaggccttccctcagataagctatttgaagactatataccctaggaatgcccttctagtctgctatcattgcatcttggaaattgatttgcatgttgtaaaagactagggtcagaacctccacacacaatatcaaaccatgtcgaaagatctcagttcttcctaagctgaggtagaggaggtccagaagtcaaaggaaatgactaaagctgtgtttcctgagctgtgcctttattattttgagatctgcctcttttaaattaaaaaaaaaaaaggagtttttttttctctccctggctcccaagcctgagggtactaaactgggtatgagtctcctagtcatggtctaagggcttgatggtgacagtattcttacccttacttagggggttcaagttatacaaagatctttcaagtctttgtcatctgctttgagcttatcttgaaatattgataaccctatggggttattccttggccataggaagatgatgctggtccagagtagtcccatgacatcaccaatattggcaagtacaagaatgctgtacactataatcatcatttagatatttcagctcatgagcatgggaacagtatagaaaccaggacacaaatattctcgtatatatcggtaccctggacagtgaaaaactaagaccaacaccagggctcttgaaatagaaatttgatatatgaaggtatacttctgggcctgagtttccattctttttaaaagtaaggggcaaggccagtactgtctgggttttatcactaactgtgctgagtagctggaaacttttattccaggattcatatcccaatgacataaccaaaagagaaaacatgttttacaaacatgagtatgtaaaacatttagggtaaagagcttgttactttaatcagattcaaagctgtctcagactccaaaatcttaaaacatggtgtcagtactttttggtcactattcgaagtggccaagtgttgcctgattacatgtcaacctgatgcaagctggaattttctggatagagggcatcttaattgagaaaatgtccctgccagagtcacctgtgtacaagctggtggcgcattttcttgattgatgggggaaggcccaagtcactctggatcgcaccacccctggcttgtgagcctgtatgctataagaaagccagaagaacaaacaatgggaaagaagccagtaagcaacacttgcccatggcctctgtttcagttcctgcctccaggtgcctgcctttagttcttcccctgaattccctagatgacaaactacaagttgtaaactgaaataaatgcctccctctcccaagtttcttttagtcatggtgttttatcatagcaatagaaagctaagatatgctttcactccaattctgtccttgagtcaaagtatcttgctctcatatgttttgagatcaaggacaataatataatttttaatgtttttattaattctttgagaatttcacacagtgtattatgatcatgttcatagcccttccctagctctttctagatccacttctatctctaccaactcaacttggtgttctctctctctctctctctctctctctctctctctctctctctctcatacccatggagtccagtttgtattggctaagtactcttggacatgtcctggagtataatgatatatcagggtttagggtttataccattaaagaaaactaaccctaatcctctttaacagctatcaaatgtcagtagctccttagctacttaggtactttgttcccacaacaactttcttcataccgagattttatctagcttgtacagatcttgtgtatgctgtcacaatcacagtgaattcatatgtacaacttccctgtgtgtcaagaaaatattgtttcactacctctggcccttatatattgaccagttgtgggtctctgtattcatttctatctactgctagaaggttctctgttgagagctgagagattcactgctctacggatatagcaatacatcatcaggagttgtttcagtgttatgtctgtttagcagagtgatagtagtaggttctcccttagggcctatgacctatatagccacaggttcttggcctcattggaaataccaggtatgagtttcatttcatggagtgtaccttaaatctaaccagaatgttgttagtcactcctgagacatttatatatctattgtacctttgggcaaatcttaccaggcagatcattgctatagctttcaaggttcactggtgagattttgttaaccaaggctaggtaagatttttgttaactaaaaataaaaggttcaaatgagataaagagatgttgggcctgcttgatcatcacacagtgtgtacccccaaataacaggagcactttcctgtatttactactgacaatttacacacacacatatacatgtgggcatgtatgtacacacgtgcacatactcttgtatgcacacattcatacttacacacatataaaaatacatgcatatgcatttatacatacatctatgcacacatacttcccttctccaaacttgtattagtttcaggagaaaaagtatacctaaaagaaatcagatgcagagcccaaggaccagacaagctgtggaccaaattgggagctgaggactatagatagcctccagagatagaggctggctcatggttttggttataaagccaagtcagacagagcaagcagaaagacagactaataatttgtccaagtctgggtccatggaaccagatcaggacagaaagttacttatgccagctggcctggtcagccatgtggcaagtggagggcaaccttgaatctttactggttgcagggtgttaagatatagactgatgttatggatctgaaaaataggatggaatctctgagaaaactttatatgtgcctttacatgccctctacatcttagtatgttctttgacatgttcatttatttacttctagaaaaagagatcaaatcataggttttcatgtcacttgttcacatatatcaaccctgtggtttgccaaggactggtcttatagacatttgcaagacctgtaatgttgtctattatgtcctagctctacagtgtatacaggccagagtactgctagtcttcctacaatgcacacagtgcctacagtaaagtataatctggtccacagcatccacagtactaagattaagaatccctgctcaaaggaacaagcgttgtctgtgccaaccatgattcctagctctgctcataaatcctcctacccacaatataggtaccaagatgacttaattttccaaagaaaacaaagactctggataaaattgtcttcattaatgtaagatatgcttattggacaattgagaatgtcctatgcttgaaaacatgctcactcaggcatctgatctctctgcttatccaataagagcatctaggtgcacaagatcagaaaagaatcaggtaataagtgagaggggcatatgtacataagaggtacacatatctcataaatgctactgtttatgaagaagatgctccattcccaccttcacacacacacacacacacacacacacacacacacacacacacacacacaggttttcatactttgctaggaagcaggtagagatatttctcctgttattagatgcttgataaaaatctgttccctgtcagcttcaggtttctccctgtgctgatgctgatgctgatgctgatgctgatgctgatgctgatgctgatgctgggcctattgcagtaggcatgggctctttctgaaactcctgactgataagagggaggacagaggcagtatatgctagaaagggagaattaacgcaagaatcagactctcttgctgtagttctcatccttattacctgctaagtagacaatattgaacaaatcaggcagtctcactgagtttgggctttgtctgtcggaatgattatacctatcgtgcagagtcgcttcacaaaatctaacaaggccaagtttattcttgttatactgggcagaaaaggctccagaaattagagctgtttacaagactgaagaaatagcttagtcagtaaagtgtttgctgtacaagcttgaagattttactttaaactccagaacctatgtgaaaatgccaggtatggcatatccattaatcccagttatggggaggcagaaaccaaaagcttcctggagttcattagccagccttgctaaaccagcaagtgccaaaccaatgagataccctgccatgcacacgcaaaaaggtgaacaacattctaaggaacaacattcaacactgtcttatggtgtctacatgtatacatacatgcatgcatacatacatacatacatacatacatacaaacacacaaacaaacacatacctgcctacatgtgtgagcccaaacacacaagaacatgcacgggtgcagggaggactagaaggagacagacagacagacagacagacatgtgtgtgtgtgtgtgtgagagagagagagagagagagagagagagagagagagtgagagcatgccactatgctcgtcattttgcctcaggttggatctttttcacatccctagaggagcaagcaggagcctgtgcacttgtctagtgggcctggtaaacatagtaagtttctctccctgctttgggccttctgtaaggacgacattgcatacagtccaacgtagacacttgggtcaaccacaaggccacccagtatgccttgtgttgtagtgaatgactcagaccatagctaccctacttccctaaagatgaccatgtgcctgtgagtcaccacagccagattctccataataaccatacagactttagttacatgaaaggagttcccacacaccctacctccactgccttatctttggtaacttctcagccctcactcagggtcagattccaacttcacatgtaacagtgagcataggacttcatggcttttcttccacatagtcacaacatcacctgtactgagcatctctcgaccatgttaacagtgaaacaaaatccagtgggttatttggtgagttagcagtgcagcctagaccaaagcctcaaagttcagctggctcacagtgccagtcagcactcttgctgcccttgctaacatttctttggtatattattcacacagtacctttgcagtgcctattgtgtgtaaacttgtaaatccttaaccatggggggagaaagcatccagcaggcatgttcctccagcacccacaatctacttgaaggcttaagacaagactctcttacttcattctcattttcctagaggcaaggcatgggcttacactttgagggaacattgtggtactgagacagtggcaccgtgtgcagcaggaaggagcctgggaatcagatgactaagactccagccagccagtggtagatcttggagaagtcactcagttgtcttatctctgaaatggagatgtcaatgactcttcattcttactctgcagtgttccagggtggagttaatgagattatatttagagggacttggcctatataccactgaattaaagtaaggagttaatgtcctctccttccttctctctctgattggcagcctggcaaacatgccattgaatgggaccaagacttcagtattcttgttctctcccctccctggttttctgaataccagccttacatactcagtagacatttttgttgctaaccactgctgtgtcttgtccttctgtcctgtggtaaagtcagcttcagttatgtactttgattgctggtcaacatcctctgtttttcttcccatcgaatagttgtggcatgtatgtgatagtgggaaaagacaccaaccctgactcagaagaaggaaaagagagagtatcggcaatcaacatactatgtccaaagagtatatgatctgatagtgacataaatggagaacatacatagaagctttcctcatatcttgcattgtttgagcaggacagagagaacatcttgctgccattttcccatagcaatgactgttgtgatctctcttaggaagacttggctgggaactcttcaggtttgcctggatgaggttagttctagagagtggaagcagagaaggacagatattttgatgtcatgtgattatggcattttctttgacaggcattcaggccctgtggctttttatctctaaaaccaggagtctagtttcttattatctctctcagactaaagaatgtaatttaacctctctgagctaggtaacaaaaattatctttctcttcttgtttggtagcataccccttccagtctgagatccattaccatttccagatgtggaataactgcagtgctaatcactcctgagttttgctgggttacctttccagggtctctaggccctttaatttaatcatcatggtagtcaccagcaataaagaaagcatggggtatgccaagctaagaagtacagggacttgcccaagaatagcagattttgtgtaattctacttcaattaaaaataaaaacaaaaatatatatactgaaaattgtcttgctgtgttcctgcattttcacgggagcacagttcactgactatgctccatactaacttctctgcatgtatagagtcacctctttcccatacaatttccttcctcagcctctgccttcaagatgccctcctaaacactgattaaacagctgatgtggcacctgctgccttctccataacatggataacagcccaagtttacagcatatatgaaatgaggaaggccacagaggtggaatcagctttggtttggttttattattttatggtttgtttttctattacttttgctctgtatgtgtgtgtatacacacatacatacacacactatatatatgtacatatatacatatgtacatatatatgtatatatatatatatatatatatatatatatatatatatatatatatgttgcatttccaccctctatttataaattgccttctcttaactccaactttgaaaaccaatgaaagaaaacctgtttcaagattaaatattatgtcaacatgtgcctaggatcttaatacctccaagaaaagtcacaggggctatctcctcctatacaaggctttaatagtggagagagtaaagataaaatggaagagccattccagcctttacccccttccttcctgggcctcattccaacaaatgctgatgcagggcaatgcagacagtgaaaatattcactgaaagaaaacagatagtcccctgaaagccattcccaaggtctttcccatttctagtacctctcctttttattaatggtgtcctcatcaggagatgtaccaaatctttgtttgtaaccctaatggcagttaaacctgatacctgctttctatatatgttctaccatccacccacaagatatggtacctactgtaaagccacaaaggattccattctcacctgtaccagtccctcagcatgaggctcccttgacctgctcattcctcttggtatcagctggaacttggatataagacccgttattgttttaacgtaatgggtcaaaagcaatagtttttttttttttttttttttaatcttcagaaacagatcaacaggaataaataaagcagcagctttaaaaagccaagtcgtgtttgccaagggtcgggaactggaggaattaggttcctgatggcagttctgctaaggtctaattgtgtttgtagagcccatcaaaccaatgagtctgctgttttgtgtgtgtgtttgtgtgtgtgtgtgtgtgtgtgtgtgtgtgtgtgtgtgtgtgtgtgattaaaacgtttctggagaattcttgccaagtctttagaaggtatatatgcacgtgtatgcatgcgctcatacacacttgcacacacatgtgtatatatatgtaagtacatggtacatgtgaggaggaagagactctggaatagaaacctgatctgggaaatttctgcagtatctctgacccctgagaaaaagaaatgggagtaccaggaaaagtgcccttggcctaaacccaggacccatcctggacaaagcctcttaatgaaatccaggctttgagccacaagtttatctttaactcttaagttgggttcttggaacctaaaggataatctagaggaaatcacctgaaatgtggggtcctgagtaactttatcttcaaagcagagtgtaagagcaagtatgctatttttgaaaatgtgggggtgcctgaaagaaggaaaggcacagcttcaaattcatttttgttcctcccccacccatgggaaatgggctcagttgtacttttggccttagaggaacacagaccctgatttagagactctggagcctgttttgctgggaccatctgttggctccttggagcctgtaggaacagctgaggcttacagagaaattggatgaaagattctttccagaaatctccctggagcaccatgttgcatgtgtgtacacacatgtgtaagcactctcctatcttttgctctagcaagggacctcctggggtaggtaagcagcccctgcctgtaggcggcttgctgggtgtgccctgtgcctgcctttgacatctctcattccatcttcatcatgtcaacaattttcaaaccaagtgaagcattactgcatcatcacagcttgggtcccccagcatgtttctgcctacactgcctaagtggtggccagaggcaaaatgagtaagccagttaatgacaccacacccaccttatctagggctgggcttggtatactttctttgactttttctaagcaggggtgtggatttgaggcaaaatgttattgcaaaacctgttcggctgtagctgcttgctggatttctcctctgctatgcatagctcagctcctcccaggtgggttgaaaagtttagtattggagagagactcgtgggctaaagcttgcaggctgacagaaagaaggttcttatgccctctccccaccccatcatttcaacccaccatacccatccttagggttacagttgtctcattcctcgggagcacactgtgaatatctagggagaataaaaaatagaaactagactatagtaagaactttctaaactatttttgaaatcttcatataagtatattctgtgtgctgagcatatttccccattcctctagtcttgctttccttccgacccctccacaatctccttttgtcccatagagaatttagtcatacatacatacatgattttatatgactatataaagtctaggaacttccaatgaagaaaacatctgatgtttgtctttctgagactggcttaattcatttattgcgattatccattttcttataaataatataactttgttgttgttgttgtctttaatggctgaaagtaagtccattgtgtatatgccacatttttcttacgaactcctctgttggttccctaacttagctgttgcgcatggtcagtactgtagtaaacacccttgtgcaggtgtctctgtggtatgctggcttagggtcctttgagtaaatactcagaagtaggatgaactggcttatatagaagatttatttttagctttgagaaacctccatactaatttccataatggctggactaatttactctctgaccagcagtgcataagggttttctttggccattcttgccagaatgacttggtttttgttttcgtaatgattgaaattctgagtaggctgagatgagacctcagtggagtctgatttgctttcctctgatgttgagtagtcttgaatattttttctgttgtccttttgcaaactatgcgtttattttactagtgtgtttactgattgtgttgtttggtttctttctctttagttttttttttttaagttctttgtatattataaatatgagtctgtggtcaggtggtaaaggtgttctcctattctataaactgtctcttctcttaattgtccagtaaagaactttctagtatggcactgtcataaaggtaaagtattctatatggttagtggctagttcactacgtagtaccatcccatagtgtaaggtagaaacaatgatagcgtgccctctacccctcagctgcccaggcaaaaggaacagtttcttatttgcctctgaggaagccagtttcccagtcccaaagatcacataagccctttctgtgatctgtttcccaggcaaaagaatctaaggggcaaagtgttcaagagtgaggcccctgctccccacaggatgccccacagcatgggaccaggcaggggcttagtgcagtggggctacagccccctacatctgcttgcccccatctctgcttttctttcttttttttttttttaacataagctttctttcttagctgctgatggtcagtagagtccaagaggcctgcaggcctgtttccacctccctctgctccttttctctccctccttccctgtggaggaaggtcaaagaagaaagaagaaataaagaatggaagacagagtgagggtgaaatgggatgttggtgacattgaagaaactggctccataaggctctctgccctctggttcaagttgaaccttgtctgccttataagccattggtaacttccccctgtctgacatgcaagtcaccagtctgtctccctcccatatacataaaaccacatgtgccttctttcaagctgaggtagatccatctgtgacctttgttcttctgacctcatccttagcttggtgagggaggagtcctggcaaagctctctctcgctctgctagactgaatgccataggccttcctctgttagtctaactctcctggggccttttgggcaaatggggaagagcgaacaactatttcaggccaggaggttggcagctgactgggctccacatgaggaaaatatctgatgggaaagaagctgttgtttattctgacttcacccccatggccactattcgttccccaagccactgagatgaccacccttttgagtggacattcattggccaggcctgccaattggcttggaagccaagtgtgttatatgcaaaatcttagtcttccttcatgcacaatgacacgattgcacagcaaggcctttccagagctgtttccttggtatcatttgcttaggctctctgctggtgtggagaagaccacatatttaggatctggaaacctgctgtgcaacctctgcaggattttggtggttctgaactcaagaagacatgagctagccatgtctctccctggtggtttatattgccttttcccaggttctaagctctgggattgagctgagctaagctaatctatacagttaatgcagggagaaaggagaggctagggatataaacaagctttattttctatagcagctatagcagagaggaaatgaaataatagaaggaacttcctaaattggagatctcccaggaacatagcatttcctttcattttttttaatgttttgagaattttatacatgagtactatatttatatcatttccacacattcctcccccttcaacttctaaatcttccctacttcctctcaaattagtgacctcttattgttgtacacacacatacacacacacacacacacatacacacatcactgagtccatttagtgtgtatgtatttgtgtttagggatggttacttgcaattggataaactatcagggtctcctttagttaaagaactataagcaaactataggcagtatttcctctctattaatactcacaaacaagataaactttaaactgttatttaaaaagttatttttcaggatattcatagtcttcatccgcagaccatattgcttgctgtcaaaggtcttaggcttacaggagccatatctgcagatatggaagaggtagactctaagaggagtacctcatgcaaacacaggagagaggtggaatccccctcccagccttttcaggcttctgacctttaaaactctcttgctggtgatccttaaattactgagctgtccactcctcagggaggtgggaagtgaatggggctgacaggagctggagcagagaaaatatgggatagaggtcaagggttgtttcacagtatattttggcagaggagctgggagtgggggaagggaaagggttgccctggcctggactttcatcctcccaagctcccttatatttaaaggagggttgtcaacttgaactgtgattgggagcatatgtctcagggattaaagacatagaccacaagaatacatacccaaagaagaatggctagacaatgtcacctttacttgttcacttcctatccctctctcctcagtcccaggagaaggcctatgtgtaacctgtcctcagagggttttgtttggcctggctgaatggagggaggaagctggcacatatggtggtagacagtgttcctcagagttcagtggcaggtgctactgtctctggtggccctcaacatctctatatttgtttcctaagaggaagagtttaaagattcaggtctggaagttggtatctctggtcacaaggctgagagtttggagatctgtcacccttcatagcacacagcaggagacaccataacacaagctgacctacacaatggtcacttgcttttcttatctgtgacttctcattcctctcataacagtcttccttatatctatgccttggtgcctgaactagctcctcacacttactatgaagtgagatctgggccccaacccatagcctgcctcaaactacagcagagtctccaaagtctcaagtatagtgacagggggagcctatgtctccagccttaccttacaacccacaaattgtgtgtcttgggaaggatatttaagcacagtgactcagttctcatctctgtgaggtaggggtgatcaccacacctcctgtgtatgaggctgattgcaaaagggactacagaggttgtagggccctgacattcaaaagggctgtaagcatcatctctctgctactctctcttgcccagctctcttctctgtcagtggctcactaatacatgaacagagatagttcattcatagttggccaaggccactgctgagcaggttccagataagcggagtgagtgtcactgtgaggagctctttgatgcctgcacctctgcctggcccctctcttcttgttgatgcagaggcgtttcctctgctgacagcttgaagacaggtcatttttcttttcctcccatataatggcctttactctccattccaacccctttccaaccttaatgactttaacatatacacagttctttaaaaaaaaaaaaagtacaagccccagtgagctgcttttcaagctctgttgtccagaaaaaacaacctcagcacatgttcacaagttactgcctgtgatgacagggggtcttgtgctaatttcctcctgtttgaagccccacagtgggggctaggctgaggcagccagcaggaagaaagcaggagaccaattccctttgctccttctgtaaactgcagcatttggggaagcatttcatggaggacaatcttgaaagataagagttgttccttgggtcaggtggacagctgagaactatcgtggacagtactgccaaatcttctctggaaatctgggctctctattctgtcccagggtagagaaaggagagagagcatcaagaaaaagtctaacccaagtcatttaaggatagctgaagccacagaccctgctgatggagactaacagggctccagggccctcacctgcctgcagtaaagatttctctctgctgcccaaggctgtcttttgctctccgggacagacttctggtcttgtgaccctgggaatagtcaggcagaggagaagcaagatgttgctgcttcagctgcctccccagtcctcacctggcccacaaatgactgactacagggtagacatgtcaggatgggagaggacagaaaactgggagcccagctgcacacctggcagaggagtgaggctggctagaatccaggatttctctaattcagaaacaagcgccccaaagctagaaccttccctgattgacccaagacagaaaagtgcctgtctgaccctgtctgattggtgctattatcatcattattggtaatatcacagtcatcagcttgtaatttactagtttcaatggcaaggaggcttagggctcccctgggcctacatgttaagagaaaattagctgtggcagcctccccacccctcattactgccctcagtactgctgcccctcctgtgttaccagagactcccttgcccagacctggtcctctatcaccatggtagatacttgatggcaggagtcaatgctagggcaaaagggaggaacatttgtggtaggaagtatgcattcctctctttgaaggcaagaagacttcagtccatgtcctaagctagtggttctctggtgtaggcatttatcagtctcctgaaggctcatgatggtgctgctgggatttaccccagaatttctccttcgccaagtctgtaatggggtctgagtattttatctcctgatgctaatcttacaagtgtctggataatgctaacaatgttgctattggccagttctgagcaatgcttcccccttcaccagttctcagtggctatatttaaagagtttcacaggaactcttctaatcccccaccctcatagatacaggtgtttatgtgtgccttgtcaatacactcaaaattgagttcccagcaagagagccaagggcccaggtgcagtgtgaggtgaagtggggaggtgttgctagctctatacatatggacccccatggagaaggtagaggcacacatcaccctaaattggcattctaggccttctctaggaggctggggccagctatcctgactcaccatatatgcctttgttggaacactggaccccagccagactttcctcccacagccaggcctactctcatgcttccccacctgttcctgtctccagctgagcttcaagcacagcagaatggcagtattcccatgcccactgtccccatacccaatggacactcatatgcacattatgtgcactttgaagccaggctttccaaggttcttgcaatgacttttcttctgctctgagaaagcttagggattttttttcctgcaaaaacagtgtctagaatctggcttctctcttgtcttcccctttgaagaaagaaaaaacacaagcatgagcatgtaagtccacagtgtaatatagaagcagtcatatgcattcgtgttatatcccggaagcaggggcacattccacctgggatatgttgacacctcatgagaaacccacggttatttttaactaacagattagaaatctcaaggcatactctacatatgggcagcatctagcccagtagtccatgaacttgagagtttgtcagactcaccttacaatttaactgccatcaccatggggtttctaatgcaatatactggactggggagggaactgagaactgacatcgctagcaagttcccagatgagaacatggctgctggctagagaccccgctttgagacccactcacccagttatccagcccattggttaactgctagctggccctacaagggtcatttgtcagaatgacgttgcccatccctggaccaggtagcatcttttccatgttcttttgagttcctttagggaaaaatgtgactagcttgtaacttccatgttaccttgattcagaagactgtgattactgcagtaaacactctagtgaggcttattcattgctacattcctagagctcagcatatattcttttctaatcctcataataaccctcagggtagtatcccattttctaatgagacaatgaaagcagggagatgttaaggtagtacagctggcagggggtagggcaagtctgcaactaggcagtcttgttccagaatctgcatttccatctggttttcacccagtaaacagtgaggccctgtgttagattctgcataggctagctagggaaactggaaaggtgactcacacacagcactactgtgtattaacgatgggatagcatgtaggatagcatcaagacagatagatatcagtagtgctgagggccggaagtacaagaaatgagtaacagcctatgaaagtcagacatacatcaaagaaagtcaggcatttcagcatgacttgtaaacccgaggaatttagagctggagaatagactgaggttcactctttgacagcaaccagtctgtgtgaaggcactgtgtgtgtgtgtgtgtgtgtgtgtgtgtgtgtgcgtgtgcgtgtgtgtgtgtgtgtgaattcaagctcagcaggtccagtgaaccatgaattgtttggaaccaggacaactcagatctggggtacagacgagctactggcagcaaagactggttgagggtcttgctgctagcaatcttgaagagcacgctaaaaggtctgtcttttaataaccaaggggaaccactgaggtctttcaataagtaggggcatattcaaatggacaattatgaaaagtctaggttcactctagaacattctatttgcctagactcccttcacagtctagcccacctgaggacattattcttaaagctttcctgcttccatcaaaattctgatgatccatccttgttggagcctatgtccctgaccctatcacagctataaccacgctgtatatggtctaagagctcacactcagggtggcaaagtttcttgctccataaggtaagacagattttgttatgtgcaagcctggagaaatatagaggtcatagacagcctctatagatccaaacctgactctgatcaagtatgctatagccactaatgactcctctgacttccacctcctcacttgtgaaatggcagactcctcttttcctcttgtatttagcagtcactatgaccttagatcaaactaaagcttaaaagtaccaagcagaagtagggaaagggtctgaaaagtggcttcagacagggacaaactaccatgaataagaaatcaatctggttccaccctgtaaccccacctaagcctctaggtgtctttcaattgtcagacttcagcctctggttgtcaggcttggttacacactctgaggaagattatctttctttttatttttacttatttatttttttattttttattatttttttatttttttttaaagatttatttatttattatatgtaagtacactgtagctgtcttcagacacaccagaagagggcgtcagatctcgttacggatggttgtgagccaccatgtggttgctgggatttgaactccggacctatggaagagcagtcgggtactcttacccactgagccatctcaccagccccgaagattatctttcttaaccctccatcaaaactgacctctgcaccccagggccttatctctcattgagtctatgaattgcagtagtacccaattagccttctcaggcttctggcccatttaccaggagaatgtgggttactgttgaaaacattgttgcttcaggcctctacctcaggccttaaagccaagggcaaaaccaaagaaacaagagacttcacctctttgttgttaaggggctttctttgccctgataggatctttccaaggtcacattattgagtcttccttcaagtcaatagcttctgtcccttcctaggtgttgtagacccataagacctaccagaactggaatgatgcagtagaggggaggggggtaactcctcagaaaggagcgtcaaccttctatgcttgagaccttatcattgtgagatgatcagctggaattagtgggccagtatgaacaataagagcataatgtgtcctctccatcgcctcatctctatcttccccttagccttctccccagaaggtatcactttagattctatatcctcttcagggaggagtctccaggtagcacttcccagcttctgctgagtcagccatcctttctctgaggtgagatggtggatagccatggtgatctgtttctaaggcattcaggaacttctacaaagtcgttagtgttcaaagtactaaccacagctggctcccggctcttccagctttcccaaaacagtagtaacaggccaaaccaggccagagaatttccagtactgggcaggtttcagattagcaggagccaaatccaatttcccttacatctcaaagacactgaggaagaacacgggacaccagcttgattgcctgaaaaaaagaggaagctgaaaggctattaaggtgtatggtaacctcctaggaataggcctgggagaacctcaaagcaagcaaaggagtagggagatggctcagtagtcaataaaatgtacgccttacaagcatgaggccatgcgtttcatccccaacacccaaggagaagaggtcaagtatagtggttcatgatagtaataccagcactggaagactggcagaacttactgtctgcccagtcagcttaatgcctatcaacttctggaatcttggcgtcttcctaacaagggcatggaaattcctctcacttgccactgatggcttagatatgcagactttgtcacctgtctcttctacccttccttcccagtttccattctgtgctctgccttagaccgtctcctccttatctccacatctggctgatgaacatgcagggagctggaccgtgcctccctccctctaatagcccctgctccctcctatcttcaccaactgatgatccttatgactctaccttctgtgtttctcctcctccccctcctccccctggtatctctgcaagaatagaacagtactccagtgagttgttccccaccatcccccaagcaaatagttgccaggactttccaagtctccacctccttctttcccacatttcaagcttcttgctaaaagtagctggtacaaggtggtaggtacagcccttgcagtaataggcaaactatggacacatttgaaaaaaaaaaacccaattatattgtaactgcaagactaacaatctgagaactcttccccaagagacatttggcccgacacatgtattctgctaacttctcttttgttttcaaagggctgaacctttgggtctctacttctttcaatgatgtatgtatttcagtgttatgtatgtacatgtatctataacttctcacagtacacatacacatggtatctaaatgtatgcacaaaaatgtctgcattaacacacatggctacacatgaatgcacagtatctgtgtatgtttacatatagtatctgcacatgggcacactgagtcacaatgtgcacacacaatgttttcacacaggcaatgtctatatgtatgcaatatctacatatatgtatacagtgtatacatgcatgcacactgtgttttcatatatgtacacgtctccagtgtttgcacatgcaaaatagtccctgcataacagcatctgcatggatgcacacaatctcacagtgtctccatgcatactcacatgtgtgctgtggaatgcttgtgctcaggcaacattttccaggaatgagagttgagcaggctgcagtaacagatgttgcctgagtcctaactggctgccctcttgcaggtcaagctggtaatgaggggattagcgttagttcccctcatctcattcccaatatggctagttaatgctggttcagctggtaacatttttattggcaagccctccacttacccttgagatgggctcagcacacacacttaactccagcccttgatctggctgaatcgtgggaggcactgagttgtccttacatcttctgcagatgagacagctatgcaccaaagatcagtctgttcctttgtcccactgcagagagagactaggctgaaccacaggagagtttcactgtgccacatatctgctatttgatactgagaacttcactgggattctctgagacttccttgtattagctcttgatgaatataacatggggcttacagagcttgtttcaagataattaagacaattaagataatacattcacacatggtaagcattcagcaaatcctagataaagtctaaaatgtaaccatggttcacagtataagaaactagaattatgggatttttcaagagactttcagaagccttaccaatcccatatccctggtgtcatggaaaaatggctgaaatgctagaggacacatctaatacttcctgcacctgctcatatcctgagtactttagatatatctgcttagaagtttttatatgaaataattggatgcacaagcaccagtaacctgaatccatcttggagagcttggctctgaattttgctcttagccatttctagcactacttcttgcatgaaccataaggcagctatacccagagagagcaaggctggctcaaagtcctctattgttacacatcttcaccagatgtgatggtttgaatgaagatggcccccataggttcataggaaatagcactattggaagtgtggccttgttggaggaaatatgtcacagccccacatctgtgaatgagaataaacagcaagcttcctgttggccagaggcatgctgtaatcagctcctctgacatcgaggatttgttaagaagattttagcaaactgggaacagtcagcaaccaatgaactcagaagccagacttcacatgatgaggtaagtgtcaggacatgtgcttagctcagctgtcttgtgctgagttcaggcctttgtgagccctagatgccagtcacagctgagcagtgctggggccatgtttggtaatcagtgcaggggaaaaagaagaggagataacagcaattattggaagggcattggagttctttctttgaaggcagtgtcaaaacagagaggtaaaaatagagaaaggagcagaacacactgtttcacaaagcccatcacaggtatccctggctattcacaataagtttccacctacctttttaagtgctcaccccccagccacacagattaactgagttaacaaagacccagagttctgctcgtcatagggctgtgcatgtacagtgagtcattcccccagtcccaggtcaaaaggctaatggcaagtatttatgaatcactatctatattttgggcaacgggctgcccacttcacacacatttacttacttcatactcatctataggattctaaaagctgttatcattgtacagttaaagagaacagagtctagaatataatttaggaaacttagccaagttcctaacactcacagcttctctattttctcagctttaaaatgagaaggtaactcatattttaaagattacatttattttaagaatatgatgggacatgcagaaaacacataaagtcatagatttccagagtttgcattcagtgagagctaggtctcagtacaattgtctttccctctgatagtaagagccctgccaagcatgcttagaactccctggtttgtaagtaccagcagtggcagtgacagggcggtgcataacagctgctcatcacatcatcatggttctctaatatggaccaagtactagaagaacttccttattttcatttagtccatgtgtccttggtccatcttacaaccatcttcagatggcaattccaattccaactcatcctgagcagatggtccacattgccatacattctaagatggtccatattctagcccatcttgagataacagattatactgcagcctgtctccatatggtatcaccgatgacagttcacaggagccatagttccctaggccactggtgtcacagagcccctaacacccacatctctatcaggcatcggcttactgacatgccttgttactgacatgccttgtttgctgttctccctgtctcctcttggttagattatggaactctttgagagcaaggactatatttttatactaggatacttatcactcaaataaggctttaggaaaccactgattggtgaatcagccaataatggtttactgctcattaaaaatagtgaattacaaagtaaaaggtagttttgtcagcacaaaggacatcttaaaagccaaagtgatcttgtgatgtcagagtcacattgtgcggtctattgcactttggctataacatgagatttttgcctctttttcttgtgccccttcaagccagccccttcacccaatggccagtccaatcaacaatgcctggctactgtccactctcactggggcccttttctcctcctctgtaagtgactgtgcctctcctcctgactgccatgcatatccatacatgcctgctttcctatggcctgtcagtcaccagtcccaggatgtagtctccaaggtctatcccacccctactcccatcctgcagtcacaaatgattgcttcaaggcaggttgggctttgtttaatgttcatttgactttgagcaaagaggaagataaatgacactctgtctctttaaggtaaaaaagaggcatttttttttaaaggcttctttttttttaagagagagagagaaaaaaaaccatccctccaagttattaggggaaagaaaaccatttgacttaagcagcctctggcagtctgggagatgctgggaacaatatacctgtcagcatctatcaaatttggaaaacaaagccatctgcatttgaggaaatgaagggctgtgaatgagaggagtcagagaatatctgatgggaagtcatacgtgccccacacagagctgaaaaagtttgcacaggtcctgatttctgtgattagtggctagtacagttcagatattggggaggaagtgatcagcctggaattcagcattttttctaagaatcataaagattgttcaattcattcaatctgaatcctttgtgctcttgcttgagtgctgtgtgctctctctctttctctctctctcctccatcttaccttccctcactcaaggccataaaaggaaagtgacttgttttgtgccagagcagcgttaatgtgggctccaggttccttcttctctgctcagctcagtcctctgtcctcctgctgctctgtctcctttctccctctcctgaatcccatcccaacctctcagtgctgtgagtcccagcctgaacatcaatcccagtcttctttggcttccatgtcccagcttatgttctaggacagtgaccttggcctatttccaagtacagccaggtgcatcaaaaatgtacttttatagccaacaccaatctagtttgggacatatctttgccatatccagtccactgtgaggtccaagaaacacagtgtttaactttctaccagcaggaaagtagatggtccagactcctaatcatataatacctatctggagtctaaattctctcagtcctatagtcacatcattaatctatatgtttagcagggtttgagcatgtgccatgtgtctgggtctgcttgtcattcctatctgacacccccacccccaataaagtcagagtgagagttcacataaagagagaccatttatctctcaacccagctgttctaagaccaatgcctccatcaaagaacaggcctgagggaggacaaccctgaccctctctaaggagttcactctacagagtgcaagcttgcaagctcacctagcaagccaatggagagatagacagcttttaagtgaccatgaggtggactctgaagtccacagtattgggggagcctggcctacctcccagaagtctctcctcttgtgtctactgaaaattcaaagtcctgctttcatggccatctgatgaagctagattttctggggttttctgatctatgcacacagggccagttaaggtctgttcaagctcattaacctcttcataacagaacatggcattctttaaaaccacattgtttatcttctatctttattttcctttattttttcataaataaagactctcccagttcttgaactgctaaaagcaacagaaaacaccacacacacacacacacacacacacacacacacacacacacacacacacacacacacacacatttgattcagatgttcaagtttttgtcacaggatagtcttgttccctattgtgctggttagtttttgccaattttatacaaagtagaatcagctgggaagaagaaatttcaatcaaggacttggttcttctcacctggcctgagaacattttcttatttactaattcaaagaaaaagagatagcccactgtgggtggtgccacccctagataggtagtgctgggttatataaggaaggtagctgggcaagccaaggggaactagacaataaacatcgttactccatggtctctgcttcagttcctgccttcagctcctgccctgacttctctcaataacggattgtaacttgtaagctaaaataaaccctttccttaccaagttgattttggtcggcattttatcacagcaacaaaaaacaaagatgtttggcaaggcatttccttctctgagctgatatacacttttgtaaaacaggggccatgtgctcagcacaagagcttatttattataaggttaaataaaagaaatagggtatccagctattcagtatttgctgagcatctattgtgtgctggccattctccaaacacttcaggataaatcaaagaacaaaacagaacacagtctggtgcactacaatgatgtgtcttactttagaatgatctgcttgctaaccaaaagccaagaataaggacacacatccattctcctgggcagagttcctgatccctactgatggggccatatctgcagagggaaagataagagggacagatatataaacactcacaaatattaattctccatagttaatgtgcttggcccttatatctcctggacattgttgcttctactttccttagacattagagtgatttgaatgagaatggcatatatatatatatatatatatatatatatatatatacatacatatgcatatatatatatgaattaatacttggtccatagtaggtagaactgcttggtaagaactaggagtggggtggccttgtgagaggaggtgtgttacttggagaagactctgagatctcgaaaatttgcatcatttctagtatgttctctctgcctcctgcttggggttttaagatatgagctctcagccattcctgccaccatcattttgatctgccataatggactttacccattgaaactgtaagcccaattaaatactttattttgtaaattggtcatggtattttatcacagcaatagaaaagcaactaagaaagatatcagtgaaagctctgtgttgagggggcctatccaagttttctcagccagtgagcagcaacattagagcttgtactgaatccttctgaccctgaagacttgtctctgtgttctgcattgacacagagcacctgcattgttaacctggcccagtggccataacctgggctcacagaagtcagagtacaatcttgtgaagagctaggccaggtgagtggacaggttcttatatttgcatctgccaagtccaggaagagaggctaaacaacaggaatttcagtagggaattgatatttaggcctgctaaaataacccaaatttgttaggcaacacagaaacataatcatcatgctgcacatatggccactacagctccatccctagaaataagggaggtggatccatggtgccccgacctgtactctggtaagaaaattctactaggggttgagatgctcttatgggagtggcaagtgggggaagtgagtgtggtaccatgaggaaagggagggctggggtatgggcccctcctctttaggcccacatttgtagcttgtcccttctgcttccatagccctcctatcagcaaggtcatgccagttctcagtattacaagtaaacaaccatccttatactgagcaagggacacatgtgttgctatttaattatatagtgtgcactgagtctatcttgcagcttctctggggaatggcagctacagacaatgaggtgtgataaagtccattgaaaactacttagataattaatgtaaatattagtgcttactttgctaggagtgggtgtggaaaaaaggcacagttccctcactttcctctccctgcttgctctcctcttcctctgtgctcttttcattcagaaactctaacaactctcaacatttggaacagtctacattagtaattctgggacaagatgtagtgagagaaagaggttaaaatcagcatcaggagatgtgaagcttggaagttatatgtggatttcctaactgatgctccccggtgacctagaaacacatggagtcagcacacacattccaccatagccccaagctccctctctattttgggaactctctctcactcagtagccccaggtgcagactctggtgccatgcagagttgaagaggcacaatagagaatcctattctgctaaggactaggggttgtagggagcagaatgtgtggggagactatgtaaggggaggacctgaaatccgaggtcaccatccacagagttagaagagggaaagatcctctcctaagtccttgccaactgcatcccttaccttcctctcactccacaatcctgtacctttagttaattcttagttctctaaggccttatcttgtattctgtgcaaacttccttgtattactatatacattggttggttttcctttccccagactcttgtactttgtctttcattttttgactgcatagaggcagtcaaaaaggtttccagaaggttttgtgtgcttttgtcactgagcttcatgggcttctgtgtcatatcctctcattagaaggtgctgtggcatcctagtcaactctctgcccccactctactgtgtataagaagcattcaggcacatttgaagtgatgagtgaacttggcctttctaggccccccaggagtcccagcagattcatgcctttccatcttttggggccttgctcatgtcagtgagtcccccagtcaatgttccttttccagacagccacctgaatcataagcccatagagaaatgaatgggaatagaactccagagtgtaattgttggcctcctactcagggttgcttttctctttcaaaatctatttttgggtggttcctttctataacctatgctcaacatgaaaaacacaagttcttaccatctttctgtgttctgggtatgtatggagtgaggaggaaggttcctttttagggtcttttcttggaccaccgtaggagaggctgagtgtctcaagaaagcagccttcagctcatagccctcaactgtgacaagaaatcagtctgaagggacctttttcagcagtagttggttctagtgagcttgtcattaggacttgaggagtgcttgctgtctccatttgacaaatgagacccaggtgacctggcccacatgtgagactataaagtctcatctgaaagcttcaggttcctttggcctcagtcctgaacctgacctaaggcaaggatatgaaagttatgaatttccctgtatctctctgttccttatcacctgggaatagaaacaaatgaccctatatccagcttagtgctggaccagccccagccccagacaaaagactggcagctgggcctctgtgggatatgaagacaaatgaagttgaaagagactttaccctgggttagtagggagaggcctatgggttctccttgatgtgttaagagaacaaggtggagagacacaaagagtgaaccataacaggaagttgcaggaccttagaggtgcccgctgcctcttctgcgagcagtcacaaactctcaaagctttgtttccctatatgcagacctgaatagtaattttcactccctggtcatgctgcaaggcttcactaagcccatatgtggaggacccccaacacacatacacactttaatgcaaatattgtctgaagggagtgtataaatgtctcttcccagtagggccccagtacctttcctgagtaagaggtatgagatagaaaataaatcagctttggtaccttctcccttcccatagatgcctgtagcatactaccacactaatgaccaaacagcaaactgtggaggggaggctgcatgacccaatttatgactgtctagtcagaattaatctcttgcccacagtcatttgccagacacttggtaaattcaaattgtaaattgtaggtgaaagaagtgagggtcaggtggctttggtttctttccccctggggcctgtttctctctctctctctctctctctctctctctctctctctccctccctccctccctccctccctccttccctctctcatgtgtgtgtgtatgtgtgtgacatctccataacatagctcctacctaagccccttttctaacctgccacctccttccattttgctgatctgcagacaagggtccctatgagataacagaacccattagagcagctagagtcaggtggtgactgctaagtgcatccttaggagagccctcctcctggagttcactgcatgtgacactcggagatcaagggccaggcaggtaggctgcctggacatgtgcagcctgtccacttcagtctgaaaggccttttatgttccctcttcgggttaaaaaacccacaatgcttgcccttgtgttttaaagaactaaattgtccccccccccttttttaagagtattctcagatattctcatcttttcttgtcccacataatcccccaggattttggaagaatgttttgtacatgatgtcaggaattggctgtcaaaagaggatacctcaggaagccactggggtgaattccccattaaaggagaaagcacagctgtctctctcttctcttttggataagggttgggacaggggataccttccaatcctgggaaaagatcagggcaaggccaagactgtttttcctctcgctctttgagggtggatgctgatagtaatggaacagataagagaatgggaaataaggaaagaatgggatagatttactggaaagggaagtcaaaagagctctctccccctggagccttctgggctgactgtcctttccccagtactctaatgcacacataaccagtctcctccttataaggccaatttccattctaaattgttcattattgccacccagcagcaaagtacagaaagtgtcagaacccataagcttggagagaatggacaggtgaacatgcatttgcttcctgtattctgtggggaggtgcaagccccctgggaggtagtgacaagaagtcagaacaccaacagccaagggtgagagaaggacacagcagaggctgactgcagcatttattacacatagatgtgctagacactatgtgtgacactggagtgaatagctcatatgatggtggggcgggggaaggctgctgttccaatggaggcaagcactggaaagatgcgcaaagtgagagctgaaactaaggagctagtgatatatagagaaggtttcctggggaggtgacagctcagctaggttgtgcatgctggtgccactctccatgactccaatatgcatggtttaaaccctccatctccgaggagcttcagaggttcaactaaacttttctctgtccagttacttggagtatgactttggacatacttttaacttctctgtgattgccttttccctctatatcacaacagcagtagctacctacctcacagggatgctaggggctttaatgtcttcatgtcaagaatgtgggacagtgcatacttgccaatcattgttccttgatacttttttccttccctgctgggtcatagtttctttcaggctaggaagccagaagaacccatctttgtattcctcaggagatccttccagaaaaaaagataagatgagaacatttctaagacctcatgatgagtcagtgcttattttaatagaagatgaacttgaggccaagaagaagctaagcaatgtgcccaactcacaaaggtagaaaacaagccatcaggaatatactatcatttctgctcaccacaaaggttttacagagcatatgatcggtgtcacgttttccttagtgtatctctgggtcattttccaattgctccaccatgtatgctctgcattgccctttgacattttctaaggagtctggttttcctacctgcccatcagagtgctgggcttagcatgctgtgctgtatactttaaatggactgcaggcaggacctgggcttggtctgaacacagagttcagagcaagaaggggaaaaagcaggcctcagtacaccccagtgggcccaccacccagcctgccaggcacccaggctgcagtcaggcgcctgctttcactgcagacttgatgcaatctggaaagcgcattaaacattgcacagagtagttgacatgtaattaataaagtacagattttggctggaagcctcaacttaaaatagcaccatgagtgtaggaagaggaagggcaaaggaggtaagtcagaagatggcaagaccagtgtctctgagaatattggacccagttcttgctgaagcacaccaaaattaaggtgggagagaaaaaataatcttttccctttttaaaatttatggggtgaaactgaggcccagagagaccaaataaatgcatatcccaacatgcatcactggacagaactgaggacccagccctggagagcgtttgacgcttgcccacacccgtaggtagtcagagagcactttcatatatcattgagatgctctctcatgaagctctacattccaggactgtttttaatttgagagatggtttaatggcattttgagactcactgttccctccctgattctccagagaggctggaggtagctttgcatcttctttgaagaagaaggagggaaaaaaaaagagagaaagagagaaaggaaaaaaaaagtgtttcttctacaagagtgttcagagagccctttgctgcaactagccagcatgctagtgaaaggagagatgaagaagtggaggaaaagagagccaggcctctgtggttagttcaaatgactggcctcaggggcttttgccactgaagcaggagtcctactgctctttgccacagatcccaaattgaaattccaaagtaaaatgcaaatatgaacccaactaatcaaccctggaaggacacctcaagctactagggcattccctagagcctaggaacattagttctaggtaaaggaaactgtgatggaaggatctagaagcttcaaattctaacaactctaaagcaggcctttgacaatatatggaaaactgggaaatattaatacctaccatgaaattttacagtgacccctcatgtaacttggaatattaatccatttctctacaaggcaaaaataaatgtgagtgaagaaggatatgtcaaaacctatgcagtcatcaaggtgaacaggcccacagaaccatctgatgtggaaccatccatgttccctttgcttctgtcccgccagagcatacactatccccagcacacagctgtgtcttcactgtgtctgtggcaaggcacaacagatcaattccaagctgctttagccatcccaagcctcggtgtagctatccacatgataaatgaaaagggcatcatgggacactgagttgttgagtgctagcagtcacctgttccttttcctactactttatgtaacttcctttcttctgtcccgtacctagcttactaccacctagatggatcagagagtcagaggaacgtgagtttctgcccctacccctaggttttataggcaggcaccttgttctcatgtccagaacccacaaccttatactcctatctctcctggagagatataagtcagaactccagagcaagagacccagatcatccaaatacttagccccaaccctttctacttctgggagatttgtgttgctgaagaagagacagaaaaatttcatgtgctgtgccaggtatcagaagggtggaaataagagactaaggggtggtgggttgggtttcgctggcattccactgcaggcctttgctgggcagctgaatcagacctaagagagatactgaatctagaggaatcttagagtcgactgtgggcaaacttgatagcccatctggaatccatccatgacaatgttccctcccccataccctgatctcattggtggaattgcagtggaggagcagggccaggaaccttggccatcaggctggataaatcctccaggtgccagctcccagcctctactcccactccttgctctgagcgcacaggccccctccatgcactgcctctacctcagtttctgcccctttctttgtgacctgatctgaagactttgaataggacaggaggaagaggaatggtaacagggttccagccatgcctggctatttagagcccttgaaagccagctccttggcagcaagaaatctgaatagccagccactatattagtgggctttccgagcccacagcagtgcccttatctgttggcattcttaatgtgctccattgcctatgaccctaacacctaaaaacccagattcttcagacagaaggagctaagaactaaaggatatgatattgcacaaagatcaaggaagttcgtatgtttccaacctggcggtgtctttgccatggcttgttttctgacttcccaagactattttcctttgtaagaggtcaccttccttccaggatgaacatgaggatcatgtccatgatgataatagaaagaagaattagatgacagaaacaaagaaaacctgttacaggggtccagagctgctttgcctgggagaatcatgttagctccaggaatttgtccctaaggcatctaagacacggatttctgcaccttctttccccatgtcttaggctgtaaggaatcattggccatttgttgtcgattgtcatattttgttaacttttgaacacttgtctagcatgtgggcatgtctgggggctactggttcctcttccagcaaggaacaggaaagagtcgctgctaggactggcttagactactggaaactcagctctagctctatcatttgggaaggattctaaaagcccagccaaggtaccctcttgttgggaagccccatgaattgtaaggcactgcagaccacctagagggagccaggccctttggcccaccccaaatatcttcaacaacaaactctttgggaacagtgtgttttcacagtacagcttcctgaatagtgtttgcctaatctgtctgcccaaaatccctctccaaacactaagtttcctgcccagcacaggcaatcagaaagctaattatctgagattaggaatgggggggttatcccttttaattactgggaataattagcccacctgatgtcagcaaatccaacaggattagaagtaaaatttaggttggacacaggtcagtgtgggtggtgggaatgccctgcgctctgacactagtacctcctggccatggctgatgtggtattccaggcaaatgtgggtagagtgctcaaaagagcatctttctaagtcatttggaagaatgtatgtaaagggttggggaagggggcagggcagaaaaggcagagagatagacagagacagaggtacacagaaaacaaaacaaaacaaaacaggtgggggagggggagcagaacctgcaggactgagaagggaaagagcaggaacaggaaaggaaaataaagtaaatagaaaatgaaaaaggtgtccagtaaaacaagagactggtttgtagtggacactatcacacacatatatttcaaactaacattcctgttaccttcctgtctggagggaagtcagcaagggcagcagaagccttacactgcacactgcttgcctcctccctccattttgccttcctctatccctacataccctcctctggtgcctagcacactgacctagttttgcaacacaaggtgcaggtgctgaatgcttgagacctggctgtggcaaaaacagagtgataacccagccttcaatgatctaggttgagtgtcttctgtggcccaaagaaaggattttctgccctgcagccctgatcttctctctataagaagactctcttggctcataaattcattcatttattaactcattcattcttttattttacaaatgcatccagaactttattacttttaaaaactttattactcaataaaggctgagccatggtcagtgtgtggagtccaggtcagttggctccagtttttgagaattctctcctacttcttgcaaccacctgctgatactgaaaccattccaggctcccattcagaacacctattggtgaatgttgcttccaaggggtatatacacacatgcccaatacagagactatgtctggaccaaagcaacacagtaagtacacatgaccacaaagggaagatgtgggcattatttttgcttatatttaacctcacttttttcaaaggaattcaggcgatgtataagtaaagactagacaacataacaataactaacttagaactagagcatccatgccccttcctccacaaagacatggaaggaaataaactactaagcttaatggaggctcaagactaagattagattttatctgaggttcctaagcagccaaacctcttctctctggtggaaggactcacaacattttttagaaaaggctattctcagactttacattctatgtataatttatgatcatgtaaggtcttatacagattccaggacaagactttagcatcaaaatcagagtcttcttttaaatgtcaattataatattaacccctcatcaagtgccaaggctatgaaatccatgcaataaccaatattcagggaggcactcccatgaagtaacaaacaataaaagcatctgagaccataaaggaaagagagcttactggttaagatcttgtagtccaagtttgtggctttccagagttctaagttgaccaaggatggaatgaaatttaaaagtaccccgttgagcatggcatgctgctaaaacaaaagttgaataaaatgaagactttggatccagcttctacctttgggaatttataatttatgttggcacttagatcaagactcagatgaaaacagatgagtgttaaaatgaaggacaatgaaatgttaacatcacacaaaatgcaaagctgggcatctttcagggagaccaatacactgcttcaagttcaggccttgcttggactggctgcttgtgtgatttgtgcctatttgcctcacctgcctgagtcccaggttttaatctgtgacatgggtttgatggtaaagtgaggattagtgtaaggtgcttggtgctcatagctgctttagcattaacagagaagccataagaaaaccagggaagaacaaagctctctgggaaactgcagaccgacccactgccttttttgagttacctccttccttgtggttaaaacttgtctaggacatttctggaagtgctttatcagagatggtttttcaggagccaaaatttacctcctccctgacatcgagtcaggtttatgttacaacttgataggtatctgtgagttcctttttgttccatctatttccctttctcttagaaaaggcccaggccctaggtggtgctgaatagtgactgggtttcttctgcctggataacttcacaggctacccagccctcagcttcagccctttccctacttagccctaggaaggttcaaggatcagacaaaacgaacaatgctcattcccacctctcttggaggaatctctgtctgaagtggttgtagttcagggccctaaagcttccaaatggtagctgaaggagctgagatgaaaatccacatggcccccacttttcccagatactctcacccagcatgccatgagccagtgtaaccaggtatagggttatagcagagccaagaatcagcatacataggctgatctattgaacacacctctgcctccctcccatgcttccttgcagcttctctagtactccccagatcactgccaaactgtcaaaagcaccaagaagcaaagtgctgttcagttaatgatcacagccccaggagaggtacagagctcttttaagagaagcaagtgtagggggagtgggggcgtgggaggggcagagggggatgctttagtgcttggcacaaaagcctgctctttctaagtcacagattaaaagtgggtaggtccgctccagctgctttccttgtgggttaaggactaaagccaccccctcactttactcctttttaggaagttaaaaaaaaaaaatggtcagaggcagaatgttgctgtcctctagtggatccagtagcttcaatgttctggtccccagcatagaccctgtggagaccctagcaaactattccttctcatccagagagaagccacctccccagataggctggtagctccaagagcaaatgccctagctggttgcacttagccctcccttttctcctggctcccagcctgctcccgtggaaaggagagagtagaatgacccactgccacctgaaaattacctccctgcttggtcttcctcaacttggtcccatccacacctataggtggcgggaacagccctattctccatcccttcccaacttctctggcttctctatgttctttatcttattcttcatctggtctgaagcactgccatgcaggtggcatggcccttgccaactttgtccctgagaaaattaggaattaccacccctagctgaggctgaatactctggtgtgatccctaccctggatagttaagtcatcatctatgaagggacagtagcatatgggaaaggaggtgacatatgggaattgggggatcttgaaagaaacccatagccctgagaagtgactgctgggggaagtcttgtgtactgtagattcttgcctttgtgaacttgacacagctttgggaaaatcttagggtccctttgctccatgtcgttcttgggtcactttctgttgaacttacacaacctttagcaacagccagctcctgggaatggtgccattctggctaaggtcaggtagtatgcagcatctgggacaattgaagccttttcttcagcatcaagaggactggggcagtgtgaggggaagagccttctttctgctttactaaccagtatctcatgggacatctgctaatgttcaggtaaaagcagtgaagaatttcttcctcatgagcccaaggccaacctcagttctctcccatctcctgtaagaacctggcacctgctgtattacattctgccaccagcagagcctgccttgctggcactatgcccaacagctgtggagcatcagtatgtgttgagaagaaggtgtccagcagtgaggtgactagaagagaactcaacagtgaagccagggagcaagttagcatctgtccatcacagagacaggtgcagtggatgagacagttcttgctcaccaccctttcccaaaccacaccttgatcagtgggaaaagcctggagttgaattaattaggggtctgttgtcataggtggctcttgttaaaagccatggggagtaaatcctcttactaagctgaactctctatcttctgtgccctcaggctctaccaggatgtcagatagatcaggatacatgggtacccctgagatggaagctggggatataggaagataagtgctttcttcctccttctatcatccttgttcaaccccagctctgacctatcttcctgacttcaacacttactttctaccagccttgagaccctgcagctctttctatagcaatatttggactataataatacttcctcctgagatcttctgccagtccactgggaccagtggtcatctctatgaatgtttctatttccagggtccaaagattcatggcaggaagaacgaggtgggacaagaagtcttcttcccttctctgttttgtttttagagatgggcagagacctagaataatgaaagcacaacacttcagaccccaactttctgcccaaggctctgtgactttgggggacatcacctcaccccttcatgccttgcctttctcatttataatgtgaggataatggaggagctgaccacagaaggctataagtagaaggctgtaagcactgaaaagatgggcataagacgtttcacctgataagaacaatgggcactgaatgcaaactgtgctaacttggatccacctggctagtctaagcagatggacccagacctttagctatcaagtagtaccagagctggcagggtatacagcagtaccaagcctagaaaggcatatacagtctagtctcttctctgggtccttaatttaaggagacaactacctatattcacacatgtaactttactaggagacagtccagcaactgtgaggctaaacggtcagtagaagaggtggtggcttttgggttagatcagcaaggaggattaggatcctgacaatacaacaaattgtaaaataaaggtacaaagacagaaaaagttggggatataattggtaaggggttgaaggccatgttagctggactccagtgacaaactagggagacttttctatcagctgggacaactaaggatggggttgtgtgtgtgtgtgtgtgtgtgtgtgtgtgtagggaggtagagtgagttatgtgtatgtgtggtatgtgatatgtgtgttgtggtgggggagatgtgagtgtgtgtggggtatatagtgtgtgtgcaaggaggtgtgagcacgtgtggagatgtgtgtgtgtgttgagtgtgttgtgtgtgnnnnnnnnnnnnnnnnnnnnnnnnnnnnnnnnnnnnnnnnnnnnnnnnnnnnnnnnnnnnnnnnnnnnnnnnnnnnnnnnnnnnnnnnnnnnnnnnnnnnnnnnnnnnnnnnnnnnnnnnnnnnnnnnnnnnnnnnnnnnnnnnnnnnnnnnnnnnnnnnnnnnnnnnnnnnnnnnnnnnnnnnnnnnnnnnnnnnnnnnnnnnnnnnnnnnnnnnnnnnnnnnnnnnnnnnnnnnnnnnnnnnnnnnnnnnnnnnnnnnnnnnnnnnnnnnnnnnnnnnnnnnnnnnnnnnnnnnnnnnnnnnnnnnnnnnnnnnnnnnnnnnnnnnnnnnnnnnnnnnnnnnnnnnnnnnnnnnnnnnnnnnnnnnnnnnnnnnnnnnnnnnnnnnnnnnnnnnnnnnnnnnnnnnnnnnnnnnnnnnnnnnnnnnnnnnnnnnnnnnnnnnnnnnnnnnnnnnnnnnnnnnnnnnnnnnnnnnnnnnnnnnnnnnnnnnnnnnnnnnnnnnnnnnnnnnnnnnnnnnnnnnnnnnnnnnnnnnnnnnnnnnnnnnnnnnnnnnnnnnnnnnnnnnnnnnnnnnnnnnnnnnnnnnnnnnnnnnnnnnnnnnnnnnnnnnnnnnnnnnnnnnnnnnnnnnnnnnnnnnnnnnnnnnnnnnnnnnnnnnnnnnnnnnnnnnnnnnnnnnnnnnnnnnnnnnnnnnnnnnnnnnnnnnnnnnnnnnnnnnnnnnnnnnnnnnnnnnnnnnnnnnnnnnnnnnnnnnnnnnnnnnnnnnnnnnnnnnnnnnnnnnnnnnnnnnnnnnnnnnnnnnnnnnnnnnnnnnnnnnnnnnnnnnnnnnnnnnnnnnnnnnnnnnnnnnnnnnnnnnnnnnnnnnnnnnnnnnnnnnnnnnnnnnnnnnnnnnnnnnnnnnnnnnnnnnnnnnnnnnnnnnnnnnnnnnnnnnnnnnnnnnnnnnnnnnnnnnnnnnnnnnnnnnnnnnnnnnnnnnnnnnnnnnnnnnnnnnnnnnnnnnnnnnnnnnnnnnnnnnnnnnnnnnnnnnnnnnnnnnnnnnnnnnnnnnnnnnnnnnnnnnnnnnnnnnnnnnnnnnnnnnnnnnnnnnnnnnnnnnnnnnnnnnnnnnnnnnnnnnnnnnnnnnnnnnnnnnnnnnnnnnnnncactttgcagctgccatcagttctacacatttaacatttccttgtaaaatgggaggaggctacctcatggagtttgggagattattccaagtaatccacacccccaatcttttacacttgggtgagatagaatagatacaaataaatgggtttaaactaataagcggagaaagctattccaaagtgtgtgtgtgtgtgtgtgtgtgtgtgtgtgtgtgtgtgtgtgtgtgtaagttgtcctacctcctttggggagaggaagccagtctctctcaatatgcctactcataacccatctgaacacctgttgaggatgttgccctgccctccacatggtcccagagtcactccttggccactacctcagcattcccaggaaaagaatctttgtatgtatgacactgtaaacagagattcttgcatgagctttgggtaaacaaagactccttggtcttgacagaattcctcattactccttattaattccttctcccaccctcctcatccctcccaactctgtgcactgtgtgaattatagctttgcctctgcataatgtgatttcatctgcggctgcttaatgcttcggctaactcttgctgtgtttatcttaatgtttcccagaacattatagtgcttcctatgcctgacagcttctcttctttctggatccttagccctgactaatactacagatatagccttgtgtataaggtacagggctgagcccttagagtagcccctcactggacgttgccttggccctttctgatctttgtagttcaaactcatcctaacagggtaaagccaaagatacagattctttttacttccaggtcttaatgtccacaagcaatcaaggggaaggcttcagcatgggaacctcaatgcttctaggatctaatcttaaccacagggtggtgagagcagagcccacatttcattctggaagtagcatgtatcaatgactgctaggctatcctcccttcacccagtttaaaccaaaatcctggcctttgatgctctgctcaaacctcagccactttctcaatcttacctgcattctatccttacacacactagagtgttgattaaatgtttatcctctaccttatatgccaagttgttaattcttagactgttccaagatgccagaatctgaagaactcttctctgcatcctaggaagaagcccatcatagcctgatccccacccccgaaatccagatgtctctaaacccttctgctatgccctctgttctctattgaatatctagggaagtttataacataaacagaaataaaaataattatgtcagaaaatgcctgtctccactgtaaaagcctttctgattgaccaacagctgtagggaccagggctgtgagtgtatgtgtaggcatcatttcagctcattacatcttcgttgcctccttcttcatagacaagaaaggatccttcatcccatatcccctctttctcttttttccttggctcaaggtaacctacaggtttctgacccccttaccaattatcaaaatattgggtgccagactcctagctgtccttcagagagcctcagcccactgagctgtgactttgcccactctgttacctgaggacagagctgagaccttcaaggtgctttgggagctgctaccatctccccctccccacccccacctgtgtgtgtgtgtgtgtgtgtgtgtatgtgtgtgtgtgtgtgtgtgtgtgtgtgtgtgtgtaggannnnnnnnnnnnnnnnnnnnnnnnnnnnnnnnnnnnnnnnnnnnnnnnnnnnnnnnnnnnnnnnnnnnnnnnnnnnnnnnnnnnnnnnnnnnnnnnnnnnnnnnnnnnnnnnnnnnnnnnnnnnnnnnnnnnnnnnnnnnnnnnnnnnnnnnnnnnnnnnnnnnnnnnnnnnnnnnnnnnnnnnnnnnnnnnnnnnnnnnnnnnnnnnnnnnnnnnnnnnnnnnnnnnnnnnnnnnnnnnnnnnnnnnnnnnnnnnnnnnnnnnnnnnnnnnnnnnnnnnnnnnnnnnnnnnnnnnnnnnnnnnnnnnnnnnnnnnnnnnnnnnnnnnnnnnnnnnnnnnnnnnnnnnnnnnnnnnnnnnnnnnnnnnnnnnnnnnnnnnnnnnnnnnnnnnnnnnnnnnnnnnnnnnnnnnnnnnnnnnnnnnnnnnnnnnnnnnnnnnnnnnnnnnnnnnnnnnnnnnnnnnnnnnnnnnnnnnnnnnnnnnnnnnnnnnnnnnnnnnnnnnnnnnnnnnnnnnnnnnnnnnnnnnnnnnnnnnnnnnnnnnnnnnnnnnnnnnnnnnnnnnnnnnnnnnnnnnnnnnnnnnnnnnnnnnnnnnnnnnnnnnnnnnnnnnnnnnnnnnnnnnnnnnnnnnnnnnnnnnnnnnnnnnnnnnnnnnnnnnnnnnnnnnnnnnnnntcaagctataaataattccggtcatgaagtcctacaaaaataaacttcagcttgaatcctctctcgcagcagtaaatgcacagctgcagatgtgcactcattaactcaccagagttcagtgagagcagcatcagacactccacctgcctctataaagatcagaatgtgcatatatgcatacaggcacacaagcactacctgttagatatatacaacacacatgatatacttaacacatacattacacacagacatagcacatggatgcataacactatacacaggcacacagagaggcatacacatcatatacaaaacatgcatatgacatatcacacaatttatatacacagacacaccacacaccaaacacatacatgacatacattcatacatatatcacacagagacatgctacacagagatagaaagatacatacatcatatatacatatattatactagttataccacacatatacaaatacatgatatatatcacacactgagctatatatttgtaccatgctacatatcaaacatcaaatatgccatatatgcacatactcacaaatagttacagataacacacatgcacacatatgccaccaccaccaccataccacatacatgcaaacccagagttctgagctagagccatccaataataaccctaggacaaaagatcttgtgagtctgctcaagttacaagcctcagtcacctcaatatgaactctcattttttcttaagtgctgaagtccaaaaaacagatttttaagagatctgggttcaacctcaatgagatgccttcaggtttgtaacacacttcacattttccacagatgcagttcccaccctagatctttgcttaggccttatctccttcaggaagcctctccatcgggcctccctcaagtcgatgggccatccccattctgaatactgctgaccttgtggaaatcacctcttttgagactaactcttgagtttgtgaagatgacttgtgctattcctgattccatcctgagctctctgaaggtgtgcagcatcatttatcagtgtcctctgtttcctagtgcagcctggctcatggtaggcatgtaataaataaataggtgacagtactgaaaatcttagctaataactcttttcatttccacaatagcctttttgtgctgagagagaatagccaccctcatctggcagctacaaaaactatcacatgcacaaataaaatgaattgttggaagccatactccagttgatgtgaaagttgggattagactttgtcatcaccagaatctcagaccccagcaatgcctgtaaaacccaaatttctccatagatgcctccaagatccctaaccctcctttggaccagtaatttttgaaaaccatcatgaccattgcttctgctccaaacagactgccaagcccacagacagactttataatagagttaactagaaaagaaactgatacataggcatttacagggccacaggtacgccagccagctgtgtgtactgagctaattgggacattcagagagttacatggaaaatagaaaacacatattcaccttcacagtgttaatgactctacacatattggaagcaattagacaacaattcacatagtaagtcaatacatgttagctaatacatatacaatgagcaaatcaatcgattataatactaggatatatgtccaatagagaaaaaggcaccagtgtatgtaattaattatgaggcatcaggagcttcccagagcaggcaagacttgagtcacaaggtaggatgtgatagataagctggagtaggagatcgggtaaagggtaaatgctgatctgggatggaactgtgcatggagcacattcataccaaggactccttgccaacatctccttacatgaaattctttccttgaggacatattagtccttctctaccccctgttccaacagccccagcatcactgggaatctcccaccaaaacagaggctatggtctggctcagtcacaaatttcccatctcctcaaagcagttctgagggtggcaggattaagggtattatgttatcttgctgcttctcaaattttgctgtgcctttggttaaagagcttttaactcaggtgacaatgcctaggccacacccttaaagattctgattcatggatccagctctgactttcacattcctttttcttttgaactctcaagataagcataaaaatgtaccttgggcagaggagccttaggaaaatgatgttcaggtcaattttgtttactgacctgggatgggacaaaagaaatacatactttatctccctgggtaacttgaaaatagagccaactggcatctaggggcagaaagatttctgaggcctgaaatcttcagtcttccaatgatgacaagacttttgatgatctgtgtaattgttcattcatttcagcctaacacagggtactgtatatagaaaaattgactctccaatctagagtaagtatgcatatatatactcattgcatagatacatcacaattctataaatgtatgtaaatgcacacaaaaacatctgcatagggacagtcagaatcattcatgtgcattcaaccacaaataaaacactattaggaatcccagaccgaagctgggcatcatgatgcatggtgcacgcctgtagtcccaaactgaaaatgctgaaggtagaggatcataggttagaggacatacttgcttacatagtgaagccctggttgcaaataagtgagaaacaaaaaagaaaaggagatgaggaaggggatgagagagaaggagagggggaaacagggtagaagagagagagaacagatctcagaccctgcatacagagaatggatgtgaatggattggggaacttaatatacatagcacttctttccagagcaatgacctaaaggattagcggcagtcttttataagccacccttccaaatagaagcaggtagtccataagaaggctgagtgtcagtactaagggaaatttggtttctttgcagattcgagctgatggtcccccccatggtggggtccagtatgagatggtctctgtgttcaaagatgggagcccaatcctccgggacatggccttctccatcaatcagctatacctatatgtcatgtctgagagacaggtaagtgctggtacatatctctcctttctaaactctaggaaacctctgataacctgtcacctttggttagaagttgatctaccctaaaagagagagagagagagagtttgctgtgctggggttctgagaaaagcagagccctgtggcatttgaagagggaagctgcagggccagcctcttcccggagacttctctctaggccacagcccctgtctgggtgagtgatgaaaagccctgcaagaaagagctagactgagccccgcagtatggtgtgattaggaggtagatttactgctcttggacccacagagttggctgctcatgagagccaaagaggtgtaaataatctaggcttccaggctggactggctcctgggagacagtactgagatggggggcctggaaggagatcagatcttgtcctgagtctgagattggatgcaggatcaactgggcagttctggaaagctgaaactacttgcaaaggttggaaatgccacaggaaaagccccagtcttctggttaagcagcaactgagcaagccctctctttctagacttagggaagagttattcttcagctcacattttatctacctgtgtgtgaacatagggaactatggggagaaaagtaaacagggatgatggagtttaccagactctgagaggaaggaaagcaagcaaagttcttagccatggctagccattctatccttttgatcaggaggtaaccatggatctgtagcagccatggtattgtccttttcgtgaggaggacaaaaaagaaagacaaagattctgaggttatctcagtgatgccgatgctgactgagactgggaagacagctgagctggaggaccccttcattaggtatcacccaggacctgtgtctttcctctttccatgaatgttcctcagagactctgtgtccttggtcagcttcacccttcccagagttctgtgtgctctcttttcaaagataaagaatctgaatcaatagatgacagataacagatgagcaggaatgaggaaggggggatgggtgcatggtggcattaaagaaagcagtgatgcagctctaacttgaaaattacttcttgagaatagatgacacaaatcatatgctaattgcatgcaaattacatcgagatcctcttgagcccacctgtcttttctgtctttattcatgtggcccctgcagttgaggcataaacagatccagtggagaacttagtggaactgagggaagctttgccaacccagagtgggtaaggcaattctagaaataagcattggcctactagcccaataagatggccagtgggtcttggtaaagtattactagacacataattattggaaacaaagtgcagggaaaatatcagaacaaaggaggcttggttgctacccttaaattgattactatctaatgagggaaacatccacagaaatctgtaccattggaaagattctataggtgctctgcattttcctcctattctttttgtttgtttgttttcaaggcagaaacttatttgtgtttatggaggatgcatttgtatatgagtgtattatgtgtgtggaggcaagagaccaacctcaggtgtcagtcctaaggagccatccactttgtttctgtctctcactagcctagaacttaacaaatacactagactggctggaaagtaagccctagggtttagcttgtccttgatccctactactaggagtacatatatgtgtctgtcttttgttcatttgggttctggagatccagttcaggtcctcatatttatacctctttggctcccatgagcagccaactctgtgggtccaggagcagtaaatctacctcctaatcacaccatattgtggggctcagactcacatttacatggaaagcatttactgagggagccattcctccagcccccaaagagttatttttaagtaaagaaggtagatgccttctttaccccacatccttttctcagacaagatgccttttgaaaatgcattccaaatgtgggcagaagaggctgtagctcagtggcagcgagcttgcctggcatgctcaagtcctaggtcccatttctagcactgcatggggagctgagaagagaggctaggtcagaaatgaggctgttgagtaggcttcagggtgcataaggagctcctggtccatatctgaaagcatcagccctagccacataaagtacccaagtatcttgcttataaatattccttccttccccctgtcttttgcgtcagatgccctgctcttgttatagtcagaaccagacatattgagcagcagccagccatggagagctgaaattggaatcctttgggtttaatgtcatggggctgtctctggtcacgtgagatattagtaggagttccccataccaaatggagtgaagcaatcaggagcttgactctaagggagatttgtggtggagctcggaaacctgtcacctgagaagctgtaaatcatgtagaagaggtagccaggtgacttcagctggggtaatccagggctgagggccaagagcagctcatgaggcccatctgtctgggtccatggagcaaagtattgacacttagcatggtctcataaaggacacattttactgtgtgccaggagtacagtcaataagaacaaaatcaggcagcctgttttctctcccaatgtttgccattattgttctcatgttccctcaaccttagcttactcctttattaattaaaggatatgaatcagataatgagatatttctaatactctatgtcctgagtcccatctcataattttttagctgagttggcttagacaagccacttaatctcagtgtatttcactcaaagagagtgtgagatcagttgagataacagacgaagaatttcttcttattcaacatcaacagccacacacttaccatgagactctatacagcctcatccagtcctcactcactatattccaattactgggtatgtagaggtatatgattattagtattaagatagttgtgtgtgtcccagattgctggcctggcctgagccaggaggcccaggttctagagcctgtagtcttgactgtagcaatagcttctgagaagcctggtttttgaactcctcagggacttggaaaggcaaacttctaagacagagatggtagtctaattccagcatctcccagatcttagaaagagttagaaaagtcctgggctgagacttttaaaaataatattgacaataaatgtatttttattattgctacactaatactataaaattgtctgttcctaaatttttcagttttattctttgcctatatatcttgacattttttgtattgccaagtcattaagaatagtcctggggttctggtaatttttctttgctgttttctattaggtttttaaagtgtctatatcatgaatgaaaatgatatctttttgtcaattatttgatgaattttggttggttgtttctcttttcatctgactctgtatgatttctaaggtcatttatcctaatatagtgatttccaatgtatgggttgtggccctttttggggtcaaataaccctttcatgaaaatcatctaagactatcaaaaacacagatatttacattatgattccaaacagtagtaaaattatagttataaagtagaaagaaaaatgattttgtggttgggggtcaccacaacatgaaaaactatattaaagggtggcagtgttaggaaagttgagaaccactattctaatgggtgtaatgaccataattaggttatttgtcataaagtgtttcttttgctactgaaggtatttattgaaatatacattaacagttttctaaattatttttctgtataactttattataatttgaattttactttctaagtttttggaacacatttgacacataaatcagttttcatgttttcctacaaatactgtactcaatagcagcataggtaggccttacattaactgtaagatctttctaaagggaaggtagttgcagccaagtgctccaataattagtttccctgaaccttgatcattattcagagagaaggaatttgtcagtcattaagtatgttcataagtcaggcagtatatctgttttctattactgtaacaaactatctgaggctctttgaacttttaattcaaagaggttttcgggacaatgtcaaaacagtatggtctaattcctagtagggcttacctgtttcacaacatcataggtatcatcaatgacatgaacatgtgtcagaagtggagataatgtgataagaccagaagccacagaggtgtgggttggagctaggtttactctttcttaacaacccttttgtaagaactaactagtatcctcccaagaataacaccttcagtaatctaattacataccagtatctcccccaaccccaaaggctctacagtactttgtagcttatgaggcttgtaaggcacactcaagtcatgtcaaaacttcatatgatatgacaagaagaatcctttctgtaatttcactttataacacactatagccagtgttattttatgtcttccctctacacttgtgttctcccaccttttcccaaagatatggtacctcttctatctttgggaccatgtgagaatagaatcaggttttcaattctgcctaggcaggtttccatcgctgtacaaagctagaaccatccaatctagcactcagatcctctctctctctctctctctctctctctctctctctctctctctctatgtgtgtgtgtgtgtgtgtgtgtgtgtgtgtgtgtgtgtgtgtgtctcacttttctctctgcctctctctgtctctctatctctctgtctctctctgtcaattaactaaatgtaattaaggaatagtactagtaagaagtgttgggtcattagtgccaccgactaacaagtcaatgttaatgtactcttaatagatctgtggcttggccagtcccagggggaaaaacttggaaagagaattctgggcctgctgttaattgtccaggttctccatcaagagaaggctggctcttccctagaaagctaccccaacttcagcagtatgtcagtagatgttataagcaggaatacaacttgctcccagatttcagtgtctaatggaagtcagtcagtgagtgctgggaaagttaggctaggagccaagtaaaacagcaagtaagaagatgaaaagaagagacatagccttgattccagcccagcttgtcaggctggccactcccagaaagggaataccactctgtcctcagggtagatgggaagagagtgtaggaatggaagcaattattctattttatactttaattagattgaattagcagagggaatacaggcataaaatgatccagcgaagggtgaaatggaaaaggggagtcactgtgcagaatggctccatgcaggctggagagagccttgggaagaacagagggctggtgatggctgacatttctagagagggtgggggcctggaattctactttccatttaaaggtctagagaggatgaatcacatagagcttaagatctggtatgtatgactgataccaccattgcatagatgcttattatgtaaccagaaaattatgtaatttttttctaagcctcagttgcttcacctgtataatggatctaataaagctgtgctctgaagataagagaacggatttaaagtgcctagtgtatgtctagcacacagtctgcacttcatcatcaatggtgccgttagtaaaacttactggtatatcagagaagaccagaagtgtctattacaacctatgcccagggaatttcctgctcccaagaacggcttgcaacctgtttttgatactgtaacctgccatcccaaatgaccagtcagaagactctggcctagccaaactggactgtgtgctcataatctggtatttatttttaaaaaaatccagcaatgtgcccagtagactaaacagacccactctctcagaacacagaaagacagttcctagcccttacgtgagaccaatatttcagaatacaggcatatgtggagaggaggaggttgttctaggtcaggttatccccaggccttagggcacatgtatggacatttggtttggaagggacccttcaggggtctcttcaggtagtaaccaaaccacaaactcagtaacaaaggcaggaaaaacctcttctgcctgtgaacactcagactcatccaagtacctttatgtacaccagtggttattagcacactgtggttgctatagtacaaactgcctcaaactttgggggcataacacagctattttttcacagcctcagggaaatgacataagcagatagggttactagaatgatggtgggaggtctggagagataccttagcaaaaagcatgtagtgttcttgcagaggatgagttccattcccaacactcctgccagtcagctcacaaccacttataacttcctggggatctaacaccatctctggcctccatgggcactgtactcatatgcacatacctctaccatgaccacacacatacatgaagcttaaaaataaacaaggggctaagactgtctgaagttatgagcagactggcatcaatctatgtgttttggacacccttacaacctagcaatcccagcacagtctctgacatagtctttaacacatcaaacatatcaactatggactctgagaatgagaaccccccacaaataagacagaaattagattaactttggaactctcatcacttttacttgtctattcactctagtcagcattacacctatgaacttacctgtgtatccatagacagaacttaagaaacaggtctaggaagcaatcaactgcatagatccctgtctcccagggtcatagaccacagaacaccagagctgactagagcttgaaagatgatccattgtaatcccagattaaaaacactcaatgggcacttctaacattgcaggcatggagcacttagatccagagtcaatacaagtgcatgaggacacactagtggttttccatcaggttgcttactacataacgttgtctaagtctccccaaaagggccacaccaatgttcttagccctgaaagaaacacagagaaatggactctgtcagcagaagtcacaatgcagggacattccctgacaaagcatgggccttcctgtgacaacattgtcccagctcttagacatagctctccctaatgacacacagagatagatattcctcactctgcataattgcaggatgctaacacattcaccactttgtcttaagtttacaagtggtagaacaatatgaacttcagcctggagttatcagacacttagattatgaagccccctcctcccagcccctctcctcccaatgggcacagaactaactcacctctctgtgactctatctctctgtctgtctctgtctgcctctttgtctttgtctctatgtctctgtatctctttctttatctctctctctctctctctctctctctctctctcacacacacacacacacacacacacacacacacacttttccctgtgtgtatttaggaagaacctggaggtcaagccagtctcctgcctgatgagatagcaatacctagccagcttcacaagagaacaaattttattttcactagtttggaggagtccctttgagtagttactaaacaggatctaggaccaaaaatagaaccattttcaaaaggactgtgttcatgcctgggataataagtctactacctgtagccaaagccactgaattttcaaaacccctatgctacccaaggaccttgtagggaaaacaaacaaaatgtgtgaattgcaacttccagattccttggcctttgcattctgacacctcaaactgttaattttgattgtgggtatttgtttagtccaggagagaagccatccccagtgtggacagaacatgcctaagtatgtttttacaaggcaaatggtgtctgtcacgggcatccccccttttctgggataggggccttgacccaggggaaacatgaaggtggggttggggttggggagagagttgagcctgagggacttgatgaattatggagtttgaggattaaaaaagtgaggataagagagttgctgctgcacccagggttagaatgtgtcactttcaatccaagcctctggtgcacatgtgtttctggttaaggacatggaacccccgtgtggatccggagctgagtctcactcagatcagtgtctttctcaaagaaagggcagaatcctgcctccaggagcacagtgcaaggagccagccatggcctgccccttccccccacacccgcatctcaggttttaagttccctcatcatcgccagcatcaaggagcccagagactgacccagatcattgctggccattaatattctcttggagcatttttaaaaataaatgttttcacctgagggaaaagaactgctaaccttcgctattaatcagacacttggattgctttttttaaagacagaattagagagaattccagcatcttattttaaagtcctttggtttggaaagaagtgattaaacacaatgctcaggctggatagactggtgccaaaaactctcattgctccaaatgggcaggggtctggggagtccactctgagctttggcaggggctttgatttctctttctagtaactgctggtggctgacaccctaactgcccatagtgatgctccaagaataggatgataggaaattactggaacttaattccagatgcccaaacagagactcacttgccctgactataatctctgtcatcaggagacacagggctaatgctggttaacgtggctcagcccagcattcttttcccaacttgactgcggcttccctcagcacagccaaaaggaagcagtggttgtgtgtacaaagttttaatttaaaaaatttaaaacaacctaggccccagagagtcactgaagatgttcccaagagtcaaattaaactcggagagatttgcatatcatttgcatatatagcctctttcattcagcagaccattaagtgtctaccatgtataatgcatagctttgtccactggtaagtcatttgcatatgcagatttggacaaggctgtctttctaaggaatggtccagcaaatatcttataaataggtctgccctggagatagtctccttatgatttcttcctgctcttttcactacaacagcactattaagtgtgggttttgggtagagataaaaaaaataggagtcctgctctagggagggctgtcaaattttgctggtaagaagtagaattaggttattcctctgtccatattcagagtgctcagtgagtggggcaacttgaaccctccaggaagtgttctcacacggatcccttcaggtttaaagtctccagaaaaggtttcctctttgccttgatacagggatccagagctagtcagccttagagattatctaagaagggcagccttttgtttcacagaaaagggggcctagatctccaaagggactttgaaaacaaagagtaaacctttaaagaggctggcagtcacctactatgagcagttaccatcaagtccagctccaggactaactgaagtgaggctttgggcaagctgcttcacctttctgcttcagtaacaccgtgtgtaaatgtgtttacttgtggtctctgcttcagtgtttagtgaattaattcaatgaattaatgccttaaaagcactcagagaagtatctggcattgcatgcctgcttaatacatgttagcattgtaattatggttttatggtcatgtcccatgcctatcaccaggccaagtcttacagagcaagattcaatttataaccacacctatagtataatctctactggttgcctggcctctcagctttgccttatttaagatgtgttgaaatctaatatttatgccagtgtttttcttcttttagttaacaaacgtgacctcagctaatgagtactattttcccagccttttctatagataagaaaactgaaattaagtctggcttgctaatttgcccatagcagtaaagctggtaaacagcaggattgggcctctgcaccaggcctcctcagtcaaagctctatttctagctctgaaaacagtgccccctgctgtgcctgctcccatcctgcaatttctctatcaagggctccaggctccagaaaacacaagctctcctaacctggctcttccaaggaagtggtagtctgtttaaaaacccaattaaaggatgccaacactgtttcagtgtcgaaagaaagtgaagaaagaaagaaagaaagaaagaaagaaagaaagaaagaaagaaagaaagaaagaaagaaagaaagaaagaaaggaaggaaggaaggaagaaagaaagaaagaaagaaagaaagaaagaaagaaagaaagaaagaaagggagagagaaaaaaacaaagaggtttgtgtcactggcttgtgtactatatacagggtcctgccaagaatgctctctcctccttaatggaaactgaaagacaattaactacccattttagacctataagggatgtaaggctccctcgaggtttaatgacctaaactgggtgtttgtagagctcttgggggtagaaatatgagtgaggtgcaagtctgggcaatggcaaagcctttgccttcctatcctttccactaccaccaatgccattcagagaccccacagtaatctcacgaccccctgtgcatgcattcttccaccctgtcctcaacaaaggaaacccttgcaaggagagcaggtacagaaaacaaaaagtgttgatgctaagcctcagtcagcctctccagtaccatccaagagtgaatgccaggattccctcaactgctggtcccagctagagagctctaaggctcagaaaggacttaccaagacgatggcaaggcagagatggaatgacactccagaattcagccttctcctactcagccctttctgacactgacactagtgctctcagtattcagttttgataactgaatgtatttgatttagaccataatatttagtgccactttggatttccaattaggcttcagtcaggcactgacagtctgatttgttttgttttgatcaacacaaaagagagcaacatcagaggaattgtgaaaaaaaaaaaacacaacccttatttctatctaccaatcactgggacagtgatgcaatgatgagaagatacagttcaaaggtgttgagagaagcacactcatcatgagccaaggaaagagggagaagagaaagagaactcttgggaagaggtagtgtctgaagtcctgggcctcctccagagtaggtgtgcaagctgtacataagaggattgtatagagactagagatgggaacagaacagtcttctacaagcttctcattcacaatgacataggctcataaataccccctagaactttgatccaggctctatgaatgatgcccttcggaggtgagaggctgacctcttgtgaattcttcaagtaaagcctcacccctcatccagaagtggccagctatgcaggttcacataaagatgtaaggttgtcttcattgcctgtgagtctagcacactgctttcacactcatgcccagcaatgattctctctagggctgtctacatgagaatgtttagggtcaaattcaggtctataaagggattcaggggaaggtaggtagattacagaaaatgatgcatctgtcttatgagtcatctgggaggctgagtcaaggctaattgcaaccttagtttcccctttgtgaaatgaattctttcaaagggcactgggaacactgtgcttggaagctgacctgggtgtgagtatgtctgtactggtgggtacttgtgtgaaggaagtaactatccctacatggccaaggagcagtgtcagtcctgaagaggtgttctatttctatgccattgcaggagagtagtgggggttgacacttctctttcaaggcttggctttcactgtttgcgacccaaactttactgcagttttctagcaggctctatgctctttctctgggcccagtttaggaacctggtatctctacttgacatttcatggttcaattccctgagcacttgccactatgaataagttagccttcctttcccatacctgttattcccactccccattcctctctgcaaacaggttgggatttgaaattgccaccagatggaagagcaccagctgccatcagctgttggcagcttaggaaacagatcatgttcagcttccatcctgcaggcaatgtttaaagataagaagcctagggtgggtagactcagtggaaggaagactgaaagggagtcatgggcaaagatgaggtcagtgtctcagccactcagttaccaagaggctcatccagtagccacctagggctcaaatgcttgcagcactaggcttgtcttcatacagtcacatacacacaagaggaacatgtaagcatagctgacagtcaagtgtgtacagggctggaaacacatcaagatcctcccagctttgaatcagaggaggcttcctggatgggggggggtgttctacttgacctataaaaggggagagtttaccattcccaagagacccaattggaaagaaagatcttcaggcttcccagctgcagcagtttagaacatgggagaaaacaaccatgtacctagaacaaagattatcactagggttaccccctggcacaagccctccattctctccaccttcaaattcctagaaaggtcttgggtcttagttacatcatcaagagaaagatatcagtactgatctattacctcctaacacagccttgttccttacggtatgaaaagggtggcatctagccatgccagttaataagataaagataaagatgttttccccttggcttttagtcccttctttcagtgatgctaatagttagtgggactttgtcaggctgggctgcttctctttccctaggagatgacaatgtccagtaattattgggtgcttaataaatacttggtataggctgtgagacaaagagacaaagaaagaaagctgttatgtaagaaggcttcctaggatggcaggaaggtccttgtaggcaagtcatcctttattcagatctgggctctgcaattctgcttttccctaaggcctggcttagcctctctaagcatcagtttttctcttttgtaaagtggggtcaatgataatggtcactattttgattgatggagaaataaaataaatggctgatccatataggatttttgagacagcaggaactcagcctatagaatgtatgcagcttggccctgcctgttttcctggtttactccttagcttcctctcctctgccactgagctcagtttttatcttgaagtcatctgccagttggatctttttccaggctatgtcttaggagacaagactaaagaagggaaacagataaccacagaagctcatttgccagttgtcagagcctgccatcagcaaagcattcctgctccattccctggggtgccaagaaaaatcagcctgacctttgatttactgctcaatatgggtttcttgcctctgggtctctaccagtgcccagcccaccttcatctttccatccctcagtattctggtgttctctccctgaatcctgctccttaccaggctgcaaggtgggtgagctgttgtgtcctctgagcatcatgaccagactcctaaattctgtgagtgtagaacaagttcaggaaagccactgttcctgtccaacagcctatttcacccagcgtgcaaagtgaagcaaaggctagcaagacaggtgctccagcattactcaagaactcagcaccatgttatagttccttccaacctgcaccctgaaatctctctattattatttacaggacaccccttcctttcatttgtgttccttctgcatctattgtcacatcagttctacacctagttgacctgacatggccggctactgtttctgcttttctgtctctttcctttctgagccagccttacttcctccaagccattcagacttaggtgtttagccagggagcagacagtagagggtggtgatggtcagtagtgttaaggacttgaaataacaaatgtaatgggaaggaaacatgacatacaggttctcaagaaaccaggaatgagctagttagacgtgtgtgtgtgtagtgtgcatgcatatgtgtatacagtatgtgtttgtgtacagtgtgtatgcatatgtgtgtattacggcatttcaaaatcagcttcaagaatgttttcctagaaactgttctcttcaagctttgttcttctctcagcctctatcacctgtgttggcacggtttccatcttcccatctgggaaagagagtttaaaaccctttgtgctagtcagctttaggattttcaagcttcctttttggacatggctgtcagcatcagttttctgcagggagtgatttaaccttcatttattcattaatccccctgcaacttcattagggaagatttataaaagtgctgaattggaaaggtcagctgtccctgggcccaggacttggtatgcctgtagctcttctcatgatcttcattcttaagattcattcttgagactggaagatggggaagacagcagcagaagatgtcagccttgtgttaggtctatgtgactcctgtctctgccatcctcaggtccaagggtctctcaaggaaatttctggtagaagcaattgagaaatggactgaggactaacctaacagacagcaaaagggagaaaaggtagctcttatgaaatgtgtcccactgtcatggacaatccctggcagaataccctagtcaacaggtcactatcttcaatgactatatgcagaagtctgtctgacattaccaaaggacataaaccccacatatcctactatgtctgatgccacatgtataaccacaggggacacctaagttcatgaaggactataaaagaaaaatcagtcttcacctgggtgaggtgaaagttgcttctgagacctggaagattctgccaaacatcaggctgaactacctcctactctgtggtagccaggtcaccactcatcttacccagaagtcactcatgctcatgtgccttgcctcaagtctctgtgtcttttgctgtcacagtggccaaccatcttagctcatggagttcaatcaatctacccagaagaggaacaatagaaagtagactaagaaatatacagatgctttaatcttgtggaaaggcaacatacttgtttgctgcctcctccctgccttctgtctcctgggaataaggcagaactcaaaaccattccagtccactccttgggataaccacaggcttctggccttctctctaacacattgatcacacttctgtttttccccatttaagctctaagtgatgaggggaccagacaggccaagagccccaacctcttacattgccagctatatagctagactcaagcagggtttgagaaaataatttcaataagaaggcaggtgggcaaacctattccatgtgccaagctgagaatattgggttttaatatgatcacagaggattacagaaattaattttattttatctaatattgtacaacttggggcttttgggattcaacatgcaaatttatgctcccagtgcaaattggagcatgtctagattaatggagaaactgtaggcacccccactttctccagaatcctattttccttatgggattacctacttgtttgccaaagatgcacccaggactaaatttcttaagaaagaggaacttcaaagcaacagaagtctgaatggtacctcttctagatagggtatataatggagcccctaagcattgatggcagtcttctgagcagcctagagactagacaggggcttccattagtcagtggaaggaggcctatgcttctgcagtctagcagtgaaggaggtgggtaagggtatttctctgagatgccagcatagtgacactctagatgtaatgagatgcctagggcattgttaatcatgcctgacctttttagatcagtgatattgtattgttttatttcatgaaataagaccctaccacaaagggcatttgatatagttagttattttatgttttgaaaggaattggcttctaaaaatgaatttggttgtgagactatccatggactccattaagatcattgaaggtattagacattgtccgccccacataagaagtgaccaacattcttcaaactatgtgctcacagaccatgtcatgagttctctactgtcatcctgacacagcctccaagccattgtgactagtcccactatcttggcctagctaacagtcactcctctccctataatctaagctaaatcaatattgaacgttaaaggagagaaaaatggcctcccacatacaggaagcatattctcagctctctttagcttggtttgcctaaggcatatatgttagttagtggaatctctggttctaattttttatgtttttctgtttctctttacttgtggccctagactaacatctagtggccacagggtagtgctggtagacctcatcatggagaaataagaatgcacacagtctgtatattttccccatcttacatctctgtcaactagataaaatagatatcctatcattcttgtaattctcaggagagcttctaaagggtggaagttcatgctacctctgttatagaacaagtgtgatcctggtcctttcctaccagttgctaaggcctcctcctaaccctggtctaaggctgttgctttctgccccttgcattctgaaaccacagctttagcacataaaattactttaaacataagcaatgacagataaccattagaggagaatcagcctttacactgtaaaaattgagctgggagttgtcggttttaagagctaagagagagacatatggacagaataacaagagaattttatttgtctctcaacattaaacctaaatcataagccacaccaggcagtctcacattacagcttactgtgttctttctttttgtaaagggtgcatagtccataaacagcccacactcaaaacacaatcatttcacagtggtttggtttcccctgtggtaaaaatgagagacaccagctctgggatccctaagttggccatttaatgactagccttgattcaatgaggtttctagggcgattaagtcaggtatcttgcataataaaacttactcatatgtgtgtcctgggctcctttcctataccttcttggcttggaggtaagaagtcactattatttactagaatggggatgaaattctagtttcatccaaaatactgtgcaaagtgaaagaagccagtcacatattggatggttcaacaaataggaagtgcatagaataaacagacacaaaaccaaccagtgggtttccagaagtggaggagttagaggcaaaggaacttgaagtgattattcatggacatcagctatcctttagggaagtattctaaaattaattgtggctttgtctattttatttacaattccatgaatgtattcaatacttttggatcatattctcctgaataaatttgggaatatgagaattttatatcaataaaaattcttataagtctttaggaggctgtactataactatctggctactcaatagcctctccttctcctagtaccctttgcctagaggatacatacacactgtagttgggctactgtgtgaggtctctctggtatctgctctcctgattttctttctctctccttgctctcctattccttttctctccaatctccttccttccttgtttcctgccaatcacatcccgtgtttacaagtcaggggcttcccatggccccaaaaatctgaggggagagagaagatggtgataaaactagaagtacccatactagtgttactagtattgttaggttattatctaggacttaatgcaatcctcaccctcttactggactaatccactaaatgaataaatgaatattcagaatttagaatatacagagacttaaaaaagcaaactcacatgactggctttcccagagcaagaatgggtcaagcttgcttgctggacctcagtgtacatcctctgaagttctgttgacccaaaacatggggctgagttgcattatttattgaaccactttaatcaagcaatttgatgggcttcaaaactatagcacctgagatgtaatctgttagtctgatatttatggccgtttatggaatatattcttgtggttcttctgttcattgtggttttcattaagactctaagcctgcttaaagcctacttatcattttaaactcttctgtttaatcttggtcagtccaactggtcaattcttcaggacaacctaagggagacagctcttgatgactcttttcttctcacagttgtatgtcttcatgacaaggtggaacaattaagtcaccacaccagtaggctctgagtgtttgtgccatgaatatgggtgggataagtcagtattggtatgtgctatgagagtatgtgggtgtttatcatgagtatgtagggatatgtgttttatatcagcttgaatacatggggtacatctgtggatatgtcagaagctctcactatgtattgataccctgttgactcatagagggttgtagggggagggaaatgggaagctaggtgccaaggggcccactggatttcagctccactcatagaggacccagagctcctggtcacctctgcagagttggatacttccatcccaacatgcaggctttctgaaaactccctttcttgactccttttctttgaacaatcctgggattattcattttttttattattagaactatccactcctaatgaaccaacgcaaaaagaactctaaatgagcacatcctttttgcatattccttttcccatagcatacctaatatcccatgttcactgtggcctctagtattttcatgctcagaatactctgcatacatctcttactaaacccagcttattccttaggtgttatccacagttgactcctaactctgcacatccagctttcttctggaaattataaaagataatacagtatttatcactaaaagtgttccctctggatcagtaagatagaatatctggtatacccatcaactacacttctgtcttctacttcttcagaggatttaggattagagttgcaagatatgatggttcaggtggtacactacacataagttttagctaagtgagaaatcggggctaaaagcaggcccttacttattgtagcatttaatgttcttagaggggtcacctttatctaaccatgcaaaagtgtcctgttagtttggtggtgctcagtaatctaaatcacactagtctcagacatctagtagcagccagaggaatacttaactaaatatataaagaatactatactgctactccaagtctctacagatgaagcctggattccctacgctgccccagaaagtgccattttcctctctgattaatactatcccatgccaccacatctctgattagtacccccaactgatcattgtcactccacactaatcaccaccactcttttctggttactaccactctaatgaataccacacgtctcccattagccacaccactgccacaccctctcccattagcatcaccacactctgaccactgccacccctctctgatctccagtacattcaccctgtttaactctggtttaattttcaccttgtcacatcttccttctaagtactccaatctttttatgtccttccaattagttaacatgctccagaagagagagtacacttctgcctccttgcttacagccacccctctaacatcttcagaggacctgtcccatggggaccccatcagttccagtaatactctaagtggcatgtccgctgaaaagcacagatggccaggctctgtgtttagagtcatataactaaactaaccagagatctctctcccaaaatgccaaccccaccaagtatttagtaacacacgggtacatttacagagccagctctctacttcattgtggggaaaatgtttctaaaatttaaggacattctagagaaactaagccagatgacacaatagaaataagaaatagccagtctttttgacagattaacctcagtgtagcttagtgaacaatagatttactgcagtcttctctggagctgtgttgaactaggagaggtagtatatgagaagacagtgccagaaatatagtctctcatttagtcctgatactagctcttgctcctcttagagaactgtgttcaatttgtcccagcaagggatggggtctatctctgacattatagatgtcaatcatcaccaggaccttttagccttcccagctccttctcctgctccaaaattgagcacccagcagtcactacatggcagtactgatgctctagcctctcataatgcatcacccgtggtgcgtggccagaccaaacccgattacactccagtggttaaaagtccaggtctaattagagttccagggaatcaagccattgtattattaatgattctctggcaatgttctgattaaaacagcaattttaataagcacagctcaatgctaagtgttcactgagctcctaattacatcagttatgactccaaaattatttaaaattctattttttttccaactagacatggcatgcaccagtaaagtactcaggtgatttggtgattattttctgtaattaatttcctaagtacttagtttaaaaaaaaaaaaaaaacggtctcttttgtctccattccatctctcctaagcttctttactccttgtcaacccaagaggcttcaaaacatagattacagttaagcagccattgacaaagtcaggaaagcagtgaggaataagaagattttttttttttttgtaatagtccccacaaccaagagatacttgcaaaacttcaacctgtgatcacacaccttgcctgactgagtgaataccagcagcatccagaaggcttctgacctccatcagtttacctcagccttgctttcattttgacaagaacatgtgtcctattgatggtcagcactcagtctatagccacaccaccctgaacacgcctgatctcgtctgaaggccagaactcacagttaccagaagacagaggcaaaagaacggagaccactcaggattagttctgaaaaaaatctcaagtcactttagaggatgaagactgtaggccattaactcctcagaagaccctggggtctgagaccttggggtctcctggtttcaaaaccaaatgagagttgacatctagaactttcctcgtcataaaatcatcttattatgaagttattaagcagcactcagaagtaatatctatgtccacctgacccatgatacaaatctggtacttgccatatgccctgttgcatctcacttccagtggatctcatggccatatgagatagcagcagcagtcatttggattattatcttgccaccaagaattctgggagatgcatctgaatctaacttggttttattcccactgttccttcagagggcatatcttggaaaagtcgtacagatcttcaatagggctaaacagccagaagctcagccttgggtaataagatgctgttaaccctaggtgtgatctcaaacagtgtcttcagagttaagatgaaagaccctgaccaggactaaactccattgatggcagcttaaatgtgtccctattcacagcactttgagcctgtgcctcatgaatgttccctgccttcctgttcacagctctttcccatacctcactcttacttctgagctgctggtcctgacccttccagagaaaaggtcagggagagatcaggcaggtacacagttgagactgtcacagatagctgtgatcttcagctggccagtgttttattttcatggctggaaacgtggtgaccttggggatacccacagcatttataactggtttccaccaggtggagatggttttcctgctgacaacacttgtgctctgattttcaagaagttcccttagtatcaccttcagggacccttctcagccaagttataaagtgccagactagcctttcctagtttggtggcctgtgtggagctttccttgattttgaggagaatcatgcatgactttacaaactcctgttgttacttgacccctgctaccagactcctatcccctctgtcccagcaatccagggcatgccactcagaccttacaagtagtcctactgaagtattcccagccttgggattcctagggcttcctctaaaaactcatataatgtcctcctttcatttcttctacccttttacattagtagtccatgacaggggaccctgggtaatgggtggaatcataaaactggatcctgagcaacggcaaatattctgccaccattgctacttaccatggttgatattttaattttaatattcaataatatttacagatgtggaaacagaaactcagaaaggttcagtgactcactcaccacagctgagcatgtgatgaggctgagcaagactcttttgtgacagttctgccccttccatgacagcataggcttctactattgaaacagtgtcacctcatggatcctaggaaaattagagatttcagccagacatgggtgtccttagcagagagaatattcttgaggagcttaaaataaaacctggattgttggacacgtgactcacttctcagcatgtgttcatatacagaattccagcatatggagagttaaagaggaatacctcagaggaaggcaagggaagcagagccctaaacacaccattaatcctgggcttgtgatgggttcatagatgcatcaaatcaaaaaggattacaaggatgcatgcaatccttggcatgatggttttatttgtaattccagcactgaggcagaaagattatccacaatttcgagaccagtcttggctatatagagaaatcctgttctctcatcaaaagtgaaaggaaggaaggaaggaaggaaggaaggaaagaaggaaggaaggaaggaaggaagggagtgagttagggagggagggagggagggnnnnnnnnnnnnnnnnnnnngaagggagggagggaaggaggaagggaggagaaaaagaggagataggagaacaagtaaaggaagaagagacgatcctatataattctaccttaaatgttatcaggacacccacataagcttgcacttgggcaaaattcatctcacatggagctgtcttaaaatgaggtgttgaatagcttatggacatacagatgggtgttttggggcttgaatgagatttttttggcatgagaagggtttgagacagagtttctgtgtgtctctgactgtcctagaactcgctctgtaaaccagactggtcttgaactcagaatgacatgtttggtcactacctcctgagctctgagattaaaggtgtgtgcctttatatttacatttaatgtgtgtgtgtgtgtgtgtgtgtattacatttctttaaaaccactagtaacataatccattgtgaaataccagttgtccatactcattcacatgtaactgagaacttcatcttgcttccctatgaaacactatgagaagctttctgtacatcagtgtagctatgatcaaaattgaaaagttgagtatggtgtctgttgagaatttctgcttctgtatcattgtgaaatcagaccagaacttttgactattgtcaaaagtagctaatttcaggagcattgataaaatttcccccctttaaaaaagattcccagtctcagtttacatcttagacaccaaagtctgccatttagttaagtcccttcaaaggcattcttatcctgtgtccctgactagtctcctcttggacttcttcccttggcatgtctgacccctaacctcaccttcctataccaaaggccatgggcattttctcctataaaggggatttggggtcaaacttagctttgtggcctatttttcatactttctcagtcactagaagtcaagaaccatgagtacagggcaaagccagagcccagggtctattaggcaggagcacaacacagataaatctgagctcaatgtgataaggctggacttggaccccatggctaggagccttactggaggcagttcttgacaaggatccagtatggattgcaaggatgggactgaccaggttcctctccttggttatgagtagatgctggctccatagggaactaggatattgctaatctcaggcatccagcttcaagataggagatctgtttaaattatttcttagctccttttttctcaatccttctcaactcctgtttcctatcccacctgttttccctaactgaataaatccactgttgtcatggagacaacacagcatcagcattactgatgattctctgtaggtccctccagaattctaaactagaaagggcctcacttctacctccctagtgtttccagctgaggagtcctgctggaaaaacagtgtgctattgaaagatactggggtgtctgctttgtcccttgcctttctatccaatctgttttaccttcattcataggagactaagcttaatttggcattttcagcccagaaccctagaccccgtacaatgatgggattctgtcaggaatcagtagttggaggggctgtactgttctccaggtattgtcctcttcctttagggtagatgaacaggctcagcccagagaggccaggtggaaatgctcaaggacactggcaacactaaaagctgggccctcctgataccttcccatgtgcatgctgtcccctctaagaggattgctattggagaatgagttgagtgattgagcaccaactgtacacaagtccattatttatgaagacatgtcacatatttctcaaagaagaactgatagtatggttgcttccattgtgtggaaggaaacaaaagttcaaaaaggtctaagcttactgcactataggtaacatgagcaggaactgaacttgaaatgaggactgtcttctaaccacttcttaaccagcatatacagtgtctgttgctctagagagagttcctaaagagtccaaggcctacctgactgcaataccagagcagggctcagggggcctttgctcactagaaggttgaatcacactgtttgtggctagaggcctagttcctattctttccatcttgacttctgtaggacctctgcagaaacataggaaagagaggaaatgtgtctgaaaatctcaaccaactttgtacttctctcagagtgataaatagctttaattactctgaattactcagccactaccctctcacccaagtcattaaaaatagattttctctttgaacttgctctaccctcagatctacagatagtcaggagtcttaggacatgacctcagatcagctcagggtcaggaagctgtgtatttctgaagctgtagccacaggcttaagaagtacttctgggtttctggagtttgtacctcatttttcttagtggcaatgctcatagactttcataacttagaggacaggcaggtccttgatggcatttgatttattaagttttaaggatatctggatgtgattattgttttgtagaggtagagatctagtcatgaagataaataataatgactacattactgggtgttgattggtagaaaagatggctgctgaaagtatggactcagaggagtgctgcctgccgggtaattcccaagatcatctggtctggtagtattaccccactttgatatggtcatcacaaaaaagcctagagccacactgggaaccacaggccagacaggaataaaatcattcctcttcttcaggagactcacatggctgggatctgctcatggctcttccattatggtcatcatcagcttataaaacacctcagcagccaactgtctctctctgtgatttgtctctctctctttactttattatctcattttgtgctctctggcttctgattcaccaattaaaacactgttgagatgcagcaaagtagcagagaggtatgtgggaaggatgtgctggctgtcagacctggaacagtctggaaggagaagctttcctttaattcttgctcttgcccactgcctttatgtgggaaacagacagacctggactctgtttcttccactgacaaatcatgtgaccctgacagtttactttatctgagactctgtgttctaatgggaaaacaagactacaagcatgtctatataaggttaagcatagggaataaataagattgtacatgtcaagtgtctggtatgtaggagctactaggtcagtggcagctattagaaaattgttcttgctgctttattttattccatatcctgtgttgactcctaagctcagagcaaggtgatgccatccagcactctgtcagccacctgatcttactggagcctccacacctttacactgtccctgggtggctttggatacccagtactcaatcagctttgtccctgtgcagaaaaaaagatacatgtatgtaattttggatagagacatgacaggccaagggggctatagtacaagataggtctagaggtgtgacttagagtggctatctcaagcatacatgagagaatcagagctataggtgggctttcctagccactagcagccttttactctctgtgaggaccttgactaccattggtgtagaaacaggatagaccctttgttgctaggcagaatcctcactgggctctccacagtgtttgcaacaagttataacagtgacatgacttggtggaggccttcccaccaagacaacaagacccatcccatatcccatcagctagcaccattaggtgctttctgctgcaggtacaggaggcctccaacctcctagacctactctgcttcagatctggcccattgcctctctcctgaaatttatctttcctatcccacagcaggagcctttacagcttgtctcagggataaagccactcccactcagtgtaacagacagtgaagacaactctttggtgccttaattttctgttggatccagcctggatcatagcatataataaaatgcaatgatctgctctcttggagttgggcagatcaaactgagatcattctatgaatttaaccccctttgcagtaggcctttgtctatacaggactcagggaatgattctctagtgctggcagagaagaaaatgggctcagctgaaatcctacaaacttgggtcaaaaacaatctgtagggaaggactgctacaaaaggcacaaagggaggaaagaggccagggagtcatttccatcagtttcagctgctgtgtgctttgcccctggccctggggatcagactgttgttgactagggcaactgcatgctccagccaggctgtctatgacacctcccaccctgtcacctggctctcagccatggagaaagcctgtgttcctttctttgtgtcaggagcagggcacacatgtagggacaggtgtcccatctggcagggggcaagcaaattccagagaagcagaggattagatgttcagtgtctggggaacagctttcccttatcctttccctcctactctgtctctcatttacatggtcccaaaggaatcctgtgagactctgaatactgtactccagctgctacccctgcagcaagtggttagctactgccctggcctctgagccactactataccttgattttacctccattatagcttttactccactggaatgagtcttgattcccactgaactatgggttctaacagggtaaagaatgcacccctttgtctcacaaattagatgaccaaaaggttcattgaacacctgggactcaggcatgatctatatcacagaagtcttctactttcaagtcaggtgttcatctggaaggtacaggtatcaaaaccacttttctccttccaggttttcatacagggtagcagatgaacactagtgttctgtccttttggacagtcagctttgaggtcttgctctattacttctgggaattcttgcatctagaaatttatgcatttctctgtagacagaaactgtgcaaggcatctgcccagtgtgagtatggaagttttatcagggtcccagaatcatcctgtctcaggaatggtcttcaagaacttcaggaacaaggaagattcaagtagcttcccccagagacttatccccacagccaatcataatcctaggatatccctaatgagcccagtgtactgagtggagagagttgggggaagagaccccacatgtataccccactgagccctactaattaaggttccagaaggcaccaacaatgcagggccccctgggccacaggagctaagaacatagcatgagtcatctttaattaggactatttcttaagtaaatgacttaataggacagttatattcattagaagtgtaattataagacataagctcaaacaggaaagaatgtggagtgtgagggtggaacccagtcagaggtagtagctcatgggtgccagggaggcagcaggcatgcaggggcaggagatgatgcccttctgtccgagtcttcccatataattcatctcagaactcctaagccaatccaggaatctgagatcccagtactcactggaggagctttagcctagttaagatgaagtaataagcaaacactgactaaagaatcaaggagtgctccattaaactctgaattggccctggaaaagccctgctcacaatatatcatacccactttaggaaaaaaaacaaaaaaaacaaaaacgcccattctcctgaggcctgaggcctggctctatctggttctagcaagtgcaagactacctcctgggctccacacaggtctgccccaaacttctcaggtctgaacttggatacttgaagattccaaggactaagacttaaaaggacctaatttctcaagcaaggtatggtagcacacaaaggcaggaggaaggagatttcctgcctaagctacctagaaagaccttgtctccaaaactaaactaaaataaagctaaacatctgatggaggaagctcgtttctccttgggtttgaagaagtccccagaattcttttgtttgcatccaggctcttaaaacattacttcttcccatagcctaagggcagtctggttcttatttatcctgaccccaagacctgccatttaaaaatgtcctaaagaagcttaagtcagctgtgccagaggcttctaaatgtcagcacacctacaaaccaactggaaagatggaggtctgactgagcaggcctggactttgttgtctaaccttatggtgctaaaagtggttgtaattcaaggactgtgcattgagagcacagctccttggtagaccctattataaaagatattcttttgacctgtgaaaaacagactaaggagttcagagactttctgcagtctagctcctttggtctaccatagccttaccaaggaaactcaagcccacatttctaattcataccttgccaccttgtcctcatactggctcctaagaaactctgcttttctgggatgcaggtctatcctcctgaaatatattaaagatattcatcctgaaggacccaggccatgccaagacttacacaaaatccccctggtggcacaggcagacagaccaaatgttggtcacagacagaaacttcaggcttggttgccactttcctagtagctacatttcaaacagtaaaagatctcatttaacctaatatatgcaaaacattaacttttggagatgtcaatatcaaattcctagtgtgatgtttgctttttttctttaccaaatcttcaggatcagtatacattagatattcatagcacacctcagtttggactagcgctctcaaatattcaaaaggcacacagggttagtgatggtcatattagataatgaagacaccagtgtctttcttatcccagaattccctctgtcttttttcatgttacccctagaatatagcactttggtcttgtgatagctcatggattgtttgaagtaatagctttgttttaatgctggttgtttgtttgcttgtttgtttgtttgtttgtttgtttttattctcctgaagtgtgtactactagcccatatggagaaccagaccaaaagcactagctgatgggtgaaattaaagttatgtgacagtatacacagggcaggtccatgggagcttcctactgtaaggatctcctcccagtctctctggcagctgtcgctctgatttgtgcctagcttgtagatcataaagaataatgcaagttctcaagccctccctccttctaagtttcctgtttcactctactctgccttaaaaaaaaaaaaagtcacaccaggagggcccaggaaacaggaaaaatagttgtgctgttggtttcatgtttggagaagaacagggtttcactatctccatggcacttggcatgaaagtgggctttgttgccagagacactgctttcattcaaggcccccgttcccagctgctgagagctgggctgtgttttgacagacgggctgaatgtaatgcagacagttgttttaatttccagccagatgcagacatcactcacaaggagcccaaaacccaaaaaagggaatgggcactggactgatgctcttaggccttgcagagtagaccagagcaggccaacagaaacctattgagcactggattcccagatatcctgagagatttagaatcatgaggcctgcctgggcttggcacccacttctccaggagacatctgtcagaaaggtgcttcttgtaggtgttgccaactgtgaggaggtttcaagggtttttctttggtagtgataactggatgttttctttcagttgtcagatgtggaagtcttgagctggaaagctccataggaaaagcatttactgcacaagctcagatccctagaattcacataaagctgggcttggtaacatggtttagaatcccagtgctacttcagcaggattctaggggaagggagggagttctaggagaaaccctggaaacccacaggccagctaccttgttgtatatcttagtgaacaacatgagcagttgcaaacaaagtaggaagcaaaaacttgctcctgaaattgtcttctgaccacatgttcactatggcaaatacatgcctgcatttacagacacacacacacacacacacacacacatgtatatatatatatgtgtgtatgtgtgtgtgtgtatatatatatatatatatatatatgtatatatatatgtgtgtgtgtgtatgtgtgtgtataacatatgcacatatatactatacacacacacatatatatgcatataaatatatagcatatgcacatatataccatatatacatacacaaaaacacaaagataaaactattttaaatattttaaagaaatagtctcaaggagatatgagtaaatacagataaaatttttggataacagtcttctttcagggctaaattccctttcacagcctccaaaggaatatcaccctgcttgccactcattaccatgatgagtagtatattttagacaaagtgactattgcagatcagacagtcctaaatttgttatgtcaagctttctcgtctgatactgtaaatctgtttcagtggtccatgatatcattagcctctttccctattacatcaccctaacaggtcatatcagactgatctacaatcagcttaaaccctcagatatattatgcttgaggtttttaaaccaagatttcacaacctacacttgaggtgtctactttttaaacagaatttccagattttatgcttactttccctacatcttatttccttatcaaggaagtttgacttttaaggctcaacatattaagtgttatagtgtactaagagtgggtaggcctagaatgacatactgcctctccaagtctacaagttcaagttagaatgaacttatctgtaacttttgcccatgataacccttcagtttgaaaagtcttttgggtctttccatctgctggctcttcttttcatatcctcttctcccttctcctcttccttattctccccttcctctttctccttctatttctattatttttataagactgagtttttctttgtaacccagactagcctggaattcactatgtagcacaggctaggtaacttatatataatactcctatctcagctcccactcaaaactcaagtgctagaattccagacatgtgccagcatgctcagctggatatattctcatctttgaagacttgcccttaacctctgtctccatatttttgacagattagcctgaatgcccttcatctgagctcccacagcacttagtgctcacaccaatactgagcaacacacagagcaaatctcagttagggaactgtggactcctgtgaactgttgggctttgtactggctgattctgtgccatttgttgtggattctctatagctgaacatcaaggctgccacagaactggcattcaatcagtttcccctgagtttaccatgttagatccatgctaatcctctggaaaggattttgtgaacatgctccccttagatctgtattttcctgccagtagcagaatgttgtcactgggctggctgcaggtcacattttcacctgggctcacacttctagtaggtgacagtcctttatggcctagcaaatgaatttgtatttccaacccagcatgcatgtttgcaactcagaagcctcttacccagccagcaacagacacctaagatatgtcaaatggaaaactccaaccctctagcccttttgcttggcctttgttgtcacatgtgctgggcaggtgcaggagagtggtgtccacacgcaccctactcaggagcttgcccaggctcctccagaaaaccaggagggctttcaaaagctaggctttttaaagggggtttgcaagggggggggtgtgcttgatctgcaatttcccactaaccaggcaaagcagaatcaaacaggcagctcttctctgtggagattcccattttgccagactttccaaagaatgggagatttactagagaaactgaatgcagacatcagagaatgggataattggatccaggtggtacacttggttggctatgaatattatttcatgggaaaagtttcttcccccaccccatgtgtgcagtgcaggaaggatgtctcagcccaagcccagctgaaagctcttcagagatgagtttgtgccactcaatagccttttagcagaattaaccattttcaacacttgtcaggctctcgaaaagacactgatagaaagaagcaataggctggaggattttctttctacccttggtaaaaatcaaagagtctggagcgaccattgagatacttcctgtttagggttagcctcttcagatttgcccacaatgagatggaaataccttagggggaataaaggagagaattttgaaatgtatcttcaatttgtcacaacatgaccttcccatgttccttttcctctctctgccaggtcaccagggtccctgttgaatcatgtgaacagtatacaacttgtggagagtgtctaagctcaggggatcctcactgtggctggtgtgccctgcacaacatgtaagtttgtggtgttcagaggtggtcctagcatgcagaagactgggggtttcctggtgtggttgactggacagtaaaggaatttccctcttttgaacagtagagattataaatgagacacaatgtggaagatagtgagaggccacaggatttgcttcctgcatgcagttctttgctcatcctctcagcaactttaaaaccacatgactgtgttctcatgtgattgtgaaaagtcacagggcaactgtagaatcctaaaacttcccaaagcctcttgcattgtctggacaagaagctgggctaaggcttacagaccagatggtaggacgccagaacttggaatttgcactccagcttgctgctgtgtgaccctaggtgggtcccctgacaactctgggtctccatttctcctttgcctatttcacaggtgaactgtgaaacctaaatgaaataataagtgctttggaaataatgaagaggcaatacaaatcaaaataattattaaggtctctgtacccttgggaggacccttctggcctctttatttcatgattccaagaagtctgcactgcatccaactggccacatattcctattcaaatacatccccaccattgaacaacagctcaatagaaatgcaaaatcacacttaaacttcctaattcgaggagccccagaggaagagaaaaagggtgaaagccctaaaacgggagcctggctagggattctgttgcccaatagtgatggaaactccatggcgccatgccagctagcaaagcgtttctatgaaatgtgctgggtttggggtggaggcggaggcagagggccagagttcagggtcctgcacaatagctcttggctttcagcctctgcagcaggtgttgggagggctctggagagagggaggaagggaggcttcacagatgcaaaatctggactggatttaagtccactaacaaaggattgagtctctgcttgggttttggaggtaagggacttctgaaaaagtgttacaaaagtgacatcaacaaaacctggacagtaagttatcatgtaaatcagtcagggggtcaagatgccagagccagcaactctgctacaggaatggaaaagctggtaaatttgtcaagtttcagtgtgcctgacccaagaatctgcaggctctttctctgagaatacagagaatgagctacatagaaatgcccaggctttagaccctcactcatagatacatagaaatgcccaggctttagaccctcacactctgcaatagttattcacctgtcccatgtacatacatcctgctccatcttccctccctgcctttctctccaggcttcagtgcctgttacactctgcatatatagaaagaatgcagtagaattacagattggagttactgtttattttctccagcttatatcagcatctattattagatcagtaatgaccccatctctcaactaccctagaacacctcatccttctcctgatccaggtcagctgtgtcttctagaaggatggaactcttatcaagatagcccagatttcctctgctcactcaactcctcacttatcttcagggaatcttccccacctccctgggtacacaccttccagccattctacctagcaagcttgcctgggggtaggagctgcacctgttgtatgcaggtttctcattacctggcattcatatcttcaggagaccctcttgcactcttctcccacctaccccaagactgcccatctagcaggaccacgaggacccagcaacttcagcctcaggcctgaaagccagcctcttctaaagcagtagaggattgaggcagagggctgataacagaacctctgggtcccaggagattcaaaccctcctgtcgcttctgtattgtttgcccctacaagtgttattgtctcccagactatttatctctgttagagttgttgccataaatagtatgattctttcaaatagagtcatttcagttagtcaatgagataaaggctctagtcaagagctcactttaaagccatcataaggattcacttaaacccccataattcttcctttgacagcactcacatttgaatccattatgtacttggaaggaaagaggggaggagcttgggtactcagagtaggaaatactgtttgactatgtagtactgtactatgtgactatttggtttggagctacactggccctgagcctgtcccataagacacagcaggtagtagccctaagcttctgagttcaggcaacacctcacttacctgccaccatggaatgaggaccttgtgaagccagagatgatttcagaagaaatggccatgtaggctttctgacacaagcaaccctggatacctgctttatttgtctctgacttaaggcattatttcatgacacaaacattcatttaaaatatagcatgtgacaggtagaatatctcattgaataaaacgtggattcttctcttaaagaactattaatccagcaaaccatcatatgcatcctgtctcacaacaaagacccttgcctgttaacaccctagggggtaaatgataatgttattcatcattattattaatttcagtatttcaagggctagcatgaggatacatccactaaatgccaggctgcattctgagtacttctgcactttactcttagagtagccttacaaagtagggtattatcatccttgctaatttaaggatgagaaaacagagaagagaaagattaagtaactagaccagcgagacccagctagcaggtaacaggcctggtattagagacttacactctagttgtagggttcatgttcagagctgtccttcttaagtaccccaaatttcttacctaagcattccacatggtgttctttatacctaaccagcatcttggcttggaattaatacccctttctgtgaaataacattagctacatgtgacagtggatacctgagaatacagtgaaagtcatcacaaggcaacaaggtatagtgctggggcagcaatatactcttaccacagggacagtggagccatgacctcttatgaatttgtgttcatgtaggtgctcccgaagagacaaatgccaacgggcctgggaagcaaatcgatttgctgccagtatcagacagtgcatgagccttgaggtacaccccaacagcatctctgtgtcagatcacagccggctggtgagtacacagcagggaggaccgaccggagcacagagcaaacttcttttatacctgcatttcagtgctaatannnnnnnnnnnnnnnnnnnnttgccactgtgcttggcagaggcagaaaagagattaaaagaagactgagactcattcaaagtgtatgcttaaaaaggatattaaacataataaaataaccacctgtcaaggtataactcaaaatattccatgtccttaggccataactgcattttcattgtgaaggttttatgagcttcatgaatgttaattagctaatgaaacttctatagttttggttcattcatacccccactaagaggttttagctgcagtgatgctaatgaaacaatcaggggaggctgagcctattgtgagagctgaggacaaactaattgaaaagtggcttgagttcaaaacaacattttccaaattcagaaagtctattttttaccattacagtgaaactctgcaaacttagagatgctggaaactgctgttctagactggatagtagatattatttatccatcagtgaaccttctctgattccctggacatcttgtgagcctcctgccccacaccagtgcactgctgaaaagtagaagggccagagaaaagagaggaccagaaactctggggcacacagtttgcaaataaatggttgagtggtaaccagggcaaggatctactttctcctaccagcctagctccatacctggccagcctccaccctggtaaaactcacactcccaggagctcaggctaaggcctgtggtaaaggcctaagtttatgactcatttgcaggtccctctgtgcattgcagctaatttccaagtcacatagagcagagtctgagaatgttggtacaaatctcctaacttccttgaacaccaagtgctttccaatgctggacaagatttagtctttctaataataatctttatgaagactagtgaccccacacaacacgcaaccacttgttattctaattgtttagtgtcagagatggaagatcattagaccagtgcccttctttgtatcagggaggttcctgagcaataggttccgacagggaaccttgcctggttccttgttctcctgagtccttgcttctcccacagctcagcctggttgtgaatgatgctcccaacctctctgaaggtattgcttgtgcctttgggaatctgactgaggtggagggacaggtatctgggagtcaagtcatctgcatctcacctggacccaaggatgtccctgtcatccctctggatcaaggtaaggattatgtcaaaagagccatgggtgccatggtgagcttaggagtcacaaatatagacatgaagctacctgaccaatatttacataccagatgctaataatggtttatgcatcttgtttgagtttgaaaacacatagctatgcccaaggtgagattaaaggaggaaaatgttcattcttcctaggctgaaaatgtataatgtgaactgtgcccatttcctgtcctttctagaaacaggtgggatttgggcaatagattgctttgagctttctccacagaacttggtttgaatgattcttgagataatattctgaaattctctcagtaattgatcatgcctaactaagccaaggaactcagggaatctattattgagggacagactgagattctctgggagaaaaataggttcgggcaggctttctctaccatctgtgctcctaggtggctctatgacatggccttcccctcagggtgttcagtgggccccaggttctctcactctgtcttttcttgcagactggtttggcctagagctgcagctgagatccaaagagacaggaaagatctttgtcagcaccgaattcaagttctataactgcagtgcccaccaactgtaagcatgcttcaaaaggagacttgtctgggtctggatgtgggtatggggttctacttcttccttctagggcaagacttgttcagtagtaacattgaagtctctctatcagggctggcacatgttaatttaaatggcagtcattcatctcagcccctaatttcatttctttggccccaccctagtataccatctgaagcaaggatggtaagaagagggtcctgacctagaagctgtaaaaagaggccttcacttcagtcacttggcagtggctttgaaggcagggattgcagtgggtgtgaaagagtctgctatgcacacaaaggagaacaggtttaagaagcagcctttctcagtatccaatgagaaggcctgtgctggaagaggccaaagaggttttaacttcagtgtgcaacatatccctccttaatatatgttatgagcaggacagaacaaaaggaacaaaaggtggaaaatggctagaggcaactaaggcagggcaaggagactgaaacagaactagataaaaatgaccactaacccactaaattttagcccccagataacccagcttgggtattacagacttttttgagtgaggacctgtcagccttcataatctaagacagtggtaacagaatctattgtttgtgagatagcaatccagtgtgaagtcaccacattcagtgatgtatttctatatcaaggaagatgctgtctgtcacaggcagcaagttttagcagagtttccttgacagccaggattctattttatttctcaacatatcttacccttctctactcctggcattctattaaatgtcacagtatcaagttcagttcccctcctttttagtatggtaagctgagacccttaaacagtaagtgttccagtgaaagtgataaaatcagacagtagaagactcaggttagaaaccaacaaataccatttcttttaacctagactatattcgtgttcttcttgttgaatcatatatattctcaaaaatctattagtgatggagtacatgaaatagcattgactcaaactcaagaaacaaagtgattttagaacatgactgaccttgggtgtgcatggctagaaaaaagtcctttctagggtgtgtatgggcacagtcacctcttccttggtcttactagcctgagacccctgaatggactatagtccctaccacccagacttaataagaaccccaccaggtggcgccagattgcagacttatttctgttcataacagcttagtataattctgaatacagaaactgaggaagaggaagaccagaactctcagtacatttctatcacagtggtctgcacacacacagagcctccagatgatctcaaaaagaaaggagtgctctctttgggaagagcatatacgccataggtattggttatttctccatgctagggccattagtgataaggggcaaagttaccattcaagaatgtaacacaatatagaaaccatgagtgttgggaaccaaattgctaatagtcaaatgttattcaagttgttgaaataataggtgatttaacttcttggaaataatgatcacatttaacattcttttgaaaaaacaaacaaacatttcccatatattatctcacaacaccaaacaaccctgaggaccacacaggaatgttttggaacagactgatgaagaaacgtcaatgcacagagtgagtgacttactcaggttgccatcagagctggcagcagaatccataataccagatctgcctgaactctgcctctctgctttttcagctagctgctctgactgataactcatagtatactggcattaactaccagcaataagagttttagaaatttaatttatagtatttaccaatttccatggtttcaatgcttcgaccatagtcaatttcagtccattagagtaaaattctagcttgcaaaattcctgaaaatataaaccagcacactactgttttgtaggttaaagtattcccactgttgttccagtttattgctaagtttctggccccatgaacatctcagatgcagaatccacattttcagcactagatggtcccctagtttaccttcccaagagtgagatgaaaatgtaaagataacagccttcctttatgacaggccctcttattctctccttgcaggtgcctgtcctgtgttaacagcgccttccgctgccattggtgcaagtaccgtaacctctgcacacatgaccccactacctgttccttccaggaaggcaggatcaatgtttcagaggtaagaacattctctgtggcatgacaacattcccccaaaagcagtctccttgcatcctaaatggtctgtccagtggcttaaccatctcttgtcctgtcctattttggtcaccttatcagagattctgcatgttataaataaatgatactataaggtccaataaagtagcaacagaaggcccccaaaagaggctaaaactgctagactactaagactgtattcaagagtgtaaaggtgattgctacttgaaactaaaagctcggaggaagcatacccaacaaatagactccatgctctgagagactgtaatgaatgctatctattctttgagcctagctctttgcttggctgtagacttactgtgcttcaatagaacattcactctcaaccattttttcatgccaacttttcatccaactctaaaattcaatgattctttgactctgatgtattactgggtgggtggccttggagacagaaagaaatccagctagcaaaaagcaccgagcattgccaaaagtcctattatattatctagttgaagctccttccctaaagtctgacctgcctttgtcattgatacagtaaaatatcatgttcatctttgctgtgaatattccacttaataccaattattcacaaagcttgtgtctctcacattcctgaatatgcctcagctccatgaagcctgcttctcaatttcccattcttttgtctattttttcgtgcccaggggcagccaattagaactagacaattagtaccttgtacacacaactcacaccaccaccaccaccacccacacacacacttttttcagtattttagaaaaacttgcagatattaaggagtgactgtgaaattctcatatactactgtagcctttctaggtatatttccctcctgcactgaactagaagctgcttaaagcaaaggccacgtcttatttttaagtcctaatcctttatcagtgaatgtttgtagaatgcacacatggggaaaatggtgaacagtgaatgacctctgtacctaagtgtaagtaatggggactgctactcgtcaatggtattctaaaatgaatttcttggttctcccaatttttacagttgtgctggttgtttgtatggctaaccataaagtagaccttgaagtgtttggaaacagatatacctgacactcaacagctcaccctttctgaaatgatctgtattatacaaggtttttaaagtacaagtagtctgtctgaattgaaaggaacagatagatgacaccacaactagtatttaagacaggcccacccacacctgcctcaaaataatagagccagatatccagtccctgggacaatctagattcttttcttagtcattgggcatgccaaaatgctacattgatcttaatggatcctgggaattcattccaggtctgagattctgcaggagtttgaagccagccttcttgggataggggcttaagtgcagaaggtttggagcaggagctaacacagcctaggagccaatgaaagaatggccatggggagcaagccactacagaagagcttaagggctaggcagtggaaggttagtaatcactgtcttcagaaagcaaccttcactgtggctactgaagttatgaagttccttcatacactggaagaggaaagctggaacccaggaagaaactggtgcaaatcaggacaaagagcaactctgtctctggaggctgccctttcaggcagatagaaatccagagccaagactgaggatgacctgcagctggagcaagggcaagcagattgtcatagggagcaagacaaataaactatggtggggaggcctgaggactgagccccagaagaataatttgaagcaggcccagcccccttcaccccttcactgaagcatagttcctcttgagtagcaagtgggagatttgaaagtccagagaactgcttccctgctactcatgattaaatgatcagcaaaagaccttgggggcaaaagcagacttacgtctcctgctcaatctaactttcattttttagtatccatgtcttgggtgccttgacctcttctctccatcttctccccatgtccccatcagagggcagatgctctcttgccctcattgcatgctggctgttggcacaacactagaactaaatggaatctgtgagcgaagcccagaatccatccagctgctggcttgactcagcaaaggaagtggagtgtagtttcctagcacagtggctagggcctctttctcaaagtcctaaaatacaactgaatcttttagccacagctgacaacacatttcttcttagtcagtggcttacaggctcatatttttttttctattcaaagctctgctttagggaacctcattccccaaagttcaaagaataacaaaattgcttgtgcacagtttgggtaaagttgttttagagactgtaaatcccttagatatctttctagggttactaggatatctttttaccagttccttcaagcccctcctccaactttgaatcaaaatttcatgcctgtatacttggtagaggcaatgtatcactgattagcaccgccaattagcaccaccgattagcaacactgcaacagtcacgcctcatgtgttcatagttctgcacctgtggcacagttctcagtgtgccttcccaggactgtgccatcagcatcacctgcaaacttgctagaaattcaagttcatgggtgttatcccagatgaagctaaagaatgagaaccactgacagatggcatttcagttgactctctaaactgaatgcagtttcacttaactcttatttgacatctatagtaaccaagaggccaacagcttggagatatttcccagagctaagggaaattaagcatccaggaaaatctgatttatttgctctctcagataattgggacctgtgagcatattggtctctgtggccatggttatgcttgtaggcatggctttggtctgaagtcttgctattggtcatgaaagctcagttgtggccagaccaccacaaatctatctccaaagatacttcccataaaagagtcagaaggactatacttcaaaggttcatctacccacatccttccagaagctgctaagccaaatccatgcttaagcctgacaaggaaaaactgacaagctgggccaaagcacatgcaattctgcaataggagtacactagcttacatctactgcatattttcatgtgtatgttaccttgtttgtgaataaatttcttttagtcttcactattattaagctgattttgtgacagacagaattgaggatgaatattcctgattgttggtcaaagaaataaggatgtgagaactcagccaaagtggttttgaataagcttaaatttcctgactctgctacatttgtacctacccaagaaatacacaacaatcatattaacctttgttaaaacagcttgttaccacacaatcattgcatatccctcctttgttaatctagttgtcagatatggctgactccattttgtacatgaaaaagcagaacttcatccagaccatctctcaatctctttgaaggtgctgagcttcatcttctctacgccctccctcagagccccttagctttttgacaggctatttcccagcaatatggtgttagcaggtagtatacaggaatatgtactgctgctagccttgaaggctcatctccccccgcagctgacacaggcctagcgagatgtagatacataaatatcttttttacacccatcccaaggggaagagagaaccaaataaatccgattagcttaccaggaagctagctgctctcactctttgaagtccagtgggtgaagataatgccatttccacatggaagaagtcctttagaggaccaacaagtcctccgcactgaattaggggaatcccaactaaagtgaatgggcatcaaggcagtctccctggctcttacagggccctggggtgttctcacacatctgatcacctacatttaaactgaaacacctgctgaagatggttgactgcaatgtggagtattaagaggagataaaacgacctaaggtttttgttgggaaatctgcagtatttgatcaactttgatcaacttccctctctccttgctttcctcctccctctccattttcctctcccttcctctttcactgtctcatttcatcccatgattttgcgtgtgtgtgtgtgtgtgtgtgtgtgtgtgtgtgtaaaaccaagtggcataggaatggctttagatgggatctattacctttccaagccccagctgtattgactttccagcaaccctgagagttcttggctgtcagttcttctgactctgccctttgtctcaccaaggctatttctatccaaactcctgtccttcactcgtgacctcatggatccatctcacagaccaggtgtgaatctgatctgcttccaaagatgcagattgtgaacttggaacaccaaccacttctttcctttacactgggaatagaagaaaagtcctttattatgtggacccagagccactgccaaataaacaatgtccaatgcgtcttcttgctactaggtcagtcttgagcaggtttaggcattagggaagagcctattcatcatctataaaactagtttgtaaaaacctaaaagagcacagttttctaaaattctagactgttcttcgaaaatatatgactcatgaacaactcctgcccatgacttgccattctctaagatggatgctcattggcacatatgagcatattcagttatcattccacagccatagaggacagggactggttccagaacctttacagattccaagttccttctctttaaacagtgtgatattttcataaaagcatacacagcttgtcttctaccttaaatggtctctaggtgacttagaacctatcactctatgtcagtgcagtatgagtagctgttttctttatttgagaagatatcacagtggggaccctgtgtgtaactactatatgtataacttttgttttccaaatatcttttgtccttggcaggtggaatccatggctactgagggccaaatagggggagaatttttgtcctcaaagctataaaggatgctatagtcttctttgctgactggagacatcatacttccaaacgcatatctttaagattctagacctagggctagaaagatggcttagtagttaagagcactgactgctcttccagaggtcctgagttcaattcccagaaaccacatggtggctcacaaccatctgtaatgggatctgatgccctcttctggtgtgtctgaagaaagtgacagtgaattcacatatataaaataaataataagattctaggcctcctgaaatttaaatttgttctctgaactcactagagaaacaagaactttttacagcaattgattcaaaatttgaatcaatcaatcaatcaatagctacctatatgtgtgtctgcctttaagtttgtacacacatgcatgcatatacacatgcacacacataaatacatacacacatacatacatataaacacatacacacacacacacacacacataccattacacatcagacttatttctatcataaagtctagcctgttagattctagccagattttcagctgctggctggatgtgcttcttttcagaggtatacctgggtttcctaggtttcctggatataaatctgtgaaagactctgtcaaaagtgcctgcaggggatgaaagcaaaagagcagtaaggagcaggtttatgagtcggcagcttgagcaactggctcctaaactgggacccatctgttttgggattccttatgatcctgccctctcagaaaacctgcttgcgagagtcttcctatgcagtgactggtagccaggagtggccaagcttaccctggaagtcttcctagtccttccagacaggtctcaataggaaattctggctctagctctgtataaatggccatgctcccccatagatatgtctgtgcctgtaaggtaattatggagctccagaaaccatggctacagactaccaattgtagtcccagcttgagaatcaaattgcttctcaagtttcccttatttcttaccaacctccaaagttggaactaaaaagaaacttcaaaattcttatgtctattgctttatcttctcctttacaatcactctcctgcaaacaatggctaagtatccacctcacaatatgaaaacttatgatgtgggctggaaaggttcaaattcagtccttgagaagatcacagcccagcaagaaaaacaaatctacagaaattgtggctccaaagattcagtgcaaacatggacccagagttctacctgaagacagtacaggaaagggtcaggccagacttcctgagccaagctggaaggctgggtaacagatgatcagctatctaattatgttgaagtagagcaggggccagaaagaagatggcagtggtcaagaaaaattagtctttgatagggagaaaagtgtgtgcataggcccagatacatcatcagtatgagatgcatgctccctcttcctctccctctctctctccctctctctctctctctctctcatgcatgagtacagcattctagaactatgtgttcagtatgtccagatcatgatatacaaaaacaaacagatttacaagcaagtagggaccagagtatgatcaggctgcaactgggatacgaaaaaaaaaaaaaaaaaaagaaaaagaaaagaaaagggactattgtgtccacacaaagaagctggccagttctgtagatctacagtagagattgtgattattcaacaacctatgatggcttctggcatccagtctcttcttggagactgtccacaccttgtagaaagtccagcagttttggtactaaggcagcaaataccagcagcaccttctatagaccttgtagttacatgagcccctatacattccccaaatcctttcaggaactaatgtccaaaggacagaatgtggagtccctgcaagaacttccgggagattaaaaatgtttccatgtccataaggagatctgactccctcttctggagtgtctgaagacagctacagtgtacttacatataataaataaatcttaaaaaaaaaagtttccatgtgaagactttccacatctgtcctgtagggggcagggcaggcaacaagactcagatctttgctgcaggaggacaaagttgacagtgtggtgttggacctctgcctccagacatagactgagcaaaactgacctctcccatctctcttacatctttctcttggcccctccctactgcaattccctatttgacttttgttttccaaaacagtatagcattcccacaaggtaatgaaatgagataaaacaaacaaacaaacaaacaaaaaacagagcaagtatttagagaatagctggcggagtggggaggcaggtacttgatccccctcctggaaagctggaaagcctggctcagctggaactcagaagctgaagctgtagataacaactgcctcaggcaccagacaatgtaaaaggccaaggggctggggaaccagataaaaccagaggtggggtgcctgagctggggacatgaacccatggaggctctttcatttagtctccagagataaaaccccacagtttgccatactggtgtttgaaagttaatacctaaattgtaacacacacctgaagattaggatggcttgtggaatggttgacagtatcaaagcccagcaggaggaaaagatttcatcctccccagtgactcaatgtgtctcttaaataaggtgcagctcttctcatgggcaacctacctggaaacaagaaggtcttgtcctggctcaggtgaggagagagctctgagttgaggactaatgaagctctctgcttgctcacctaggactgtccccagctcgtgcccacggaggagattctgatcccagttggggaagtaaaaccaatcacccttaaggcccgaaacctgccccagccccagtctggccagcgaggctacgagtgtgtgctcagcattcaaggggctgtccaccgggtccctgccctgcgtttcaacagttccagtgtgcagtgccaaaacagctcggtaagcagctcacccatatgacaaggccttagatcatgttgcatcacaagcagcatccatattacaagagacagaaaaacctgtaagtaccctgagccattgagccatggtctcagaggagagagctccaaaagagccttgagggtagacgttgagatctgggggacccttctgaagttaaagtacacagttttgccattgggaaaacttcttccaaaaaagaaccaaccccacccagcaccctatcggcattcaatttgtaaagatactggagggcatctctaagatgaggatggacaggaaggggtgggaggagaggaaggaaatataacattttaggagccacaatgagttaaacctacccagaatggtggacagaaagcacgaggtgtttaattataatttcagcccagagaagatctttttatctgccaactccctgtctctgactgtggggggtcagctcagagatgaagggcttgacaaaggtgttgaggaaagctaattcgcctgggagagataaagagaatctgggcctcttatcagggagctgtcagattctggggtcacaagcatttgatagaatttgtaatcggtgccaagtgcacaggaagccagactgagaaagagagcacaacaaaggaagaaggcaagggaaggttgggcgggagggccatggtaacgtgctctccagagctaagcccatggctagaaatgggcagacatgaagagggactgcccaggagacttagtgaggcacaggggagctgggccacccaagaggttgggaagggcttgaaaggcctcagtgaggtcagaagagacctgatgggggccgttctttttcctgctgagttaggagaaagacatgagcactttctttcttagacactaatccaggtaaaacctatctgcagaaggaggaggctggggagatagcacagtcagtggagtgcctgccacccaatcataaggtcctgaatttggatccccatacctacataaaagtgctggtcacaaagactcacaactgtgagccaaatgctaggtatggaatgataggagaccattggatcctattgggcagtgagtgtatcaagatctatgaacttcaactcaatctcagaaaataaaaagaatgattaaagaagatacccagcatcaacctctggcctccacatgcatatgtgcacacgtatatatgcacatatgcacaaaaatacaacaaaaccttaccacttacacctgctagaccaaccagccactccataactgtttaccacatgtcctattataggtactaggcctgagagagcagtgaggacattaacgctgtgtccccaaacacatggactctagagagaataagtgcatacatgaaagaatacattgtaattcctagaagtgccatacaaaagacagaaaatggcagtataaaaagtccaaggctaggaggaagcaggggatatgtgtgtgtgtgtgtgtgtgtggaggggtgtgtgttactagccaggatatcagaaagacacagggaaagaagaaagagaacaagactaagtgaacagggtaagctcaaaagttggctgttgtagggagaagcaacattcctttgagttgcatactcaaccaatatacagagaggggcttcagcaagtgtgtttagaactgatggatttagcaggaaaagggagtggagatctgagcctattcaggtttcagaaagaactgaaggctaagtcagaagcttaggctggctcctggagccttattgactagaaatcaggtgtcatagaaataggtgtcattaagcagtatgaggagttgctctgcacttggcttcctgtgacagagagccttaagagcttttatcctgtccccacagtaccagtatgatgggatggacatcagcaacctagcagtggactttgctgtagtatggaatggcaacttcattattgacaaccctcaggacctgaaaggtaagcaactgcttccaggtacaagtttgatattttcatgaccttgggaaaggctggggttggagagatcagagcaggctgctgctgtgccttgaatagcacactccctctgccagcagagtcctttggagactactaaagcaacatttgaagccatcaaaggagtcctgttgggagccctgttttattacagtcagagaatctacaaggcctgttcctgtgtactgttctctggttccagtgactttggagtatctatagaacctaacctaggagaacagcagagtgtcctgacagctttcctagaaatggagacaatgctatcactcaggctctccttattatattctcagccctggtcacagtcacagaacaaaaaaagcttgtaagtgttatgctctagtcctaagaccaataggggattggcatgctaactcaggttcacatatggaacagagaagctcaaaaagtgggactgggttagagcaagagggaaattctaaggctcctgtcctgtaatcttacattacactcactcagaaaacaggccttggcaggtccaccctcagggaagccattcagaatgacccaactcctaatacttgccatataaggcactcattatgcaatttatttgaaattgtttttactacttatcttagtaactctaaatgtgtgatggtattattctcatcctatagatggtgaagctgagtcatataataagtgctgagatagaatgattttagagctggcatgcaagttagtacacacacaccagaaggcagttaaggggagagcaggttctgtaggtgcttcagcgtcaatggaatacaggttcttgtccaggtataccattaaagtcaatgtagcctagactgcaagatggacatcagtctaggtagtttgtgtttacttgttcttagactagattttttttttcatcactagaagacagatattttccttgccaagttagatcagttaactcccagagattgcacccaaagattgcacccagaacctggaggaaaatggccatcagttccagactggtgcatcagacttttctgacaaggctctataattgcacaagcagctttggcttaccttcctacttgtgtctaccagatccacagcatcaaagaaagctgtacataaattaggttcagtgggacactgagtttaaatacccaagttctcaaactcagccatccaagatactggtacttctacctgaaccatggaatttcagactaatggtggcgcctctctacatcctactgccttcacacagtctctagaagggagagactcagggtcttgctgaggatctaagaaactcatggttaaagactatgtaattaagatttgtaaactcttcacaaatacttgttcaatttcagatttcctttgcctatcctgtgccttggagaccacagatatgagtatttagggcttcaagtgctgaatagtctgtgcggctaggatagggaaactagacaaaacagaggtgttgtggagtgctatggaaaaatgaaaagtgcctctccccttgggcatacacctgacctccagcagaggcacacagccaggtcacaaaagcttaagacaacttggctggaaaaggtgaaaagtgattttttgagtcattgctcattagccaccataggattatttccaggaacctccaggatccccatatccaatggcgtaatatttacacagaaccacagatatctaaatcatctctagaagacttacaacatatagttgaatgtaaatgtggaaaagacagttgttacatgctagttatcaagtaatgataacaaaatatcagtacatacatatatagctacttctagaagctgaatccatcagctgattatattcacctggagaattcacttggatctctgaattctcagtactaataagaaaagaataagccctgagctcagaacacataaagctacactttatggcttgttcctctagggcctccaaattagttagaaaaaaaatcaaaactaaatgcttgcagaatgatcatgtaatctatcaggaactagtttgtcctctctgggaaaatacattcttcatctacgttggtatgaataggttggactcactctcttcttgctaccatgcctcctacttcagccacttagactttctttaagcacaagctgactctgttaccagacccacacaatttctagggtgccaactgagattcctgtcttctcaggacccaacatcagcagcacacgaagcttgagaccagtacccatagtaagctgggaaagtcactacatctttttgagcttcattcagttttaaacttacaatgaagaaatgagcccatatctctcatttgtgagggacagctcaagagcactgttagagttcaaagaaaagttagtaggtgtgtacataactgtggagcacctctttcaaacctccccacaaccaactattatctccataataaatataggtaaacaagatttggagaggctaaatactttgtaacactgctaacaagtagagaagtcacaattaaagcacagatctgattcagtccaggagcaaaaacctttaactcattattttctgctgtgcctctggatgactgcctaaggcaccctattcactctccatgttttgctcttgcaggggtggtgaccccaatgttgtctgtggttgggggcagatctgttgcacctacaaacagaagctatgtgatgagcttctgcagtcctatctatgatggtcccctctctttgcagtacatctctacaagtgtgcagcccagcgggaaagctgtggtctctgcctcaaggctgaccacaagttcgagtgtggctggtgcagtggtgagcgcagatgtaccctccaccagcactgccccagcacttctagcccctggcttgactggtccagccacaatgtcaagtgttccaacccccaaatcacagaggtaagtctccagcttccaaaagaaaagggaacagccagggacatagcaaagaaatatatttatgaatgaatccctggacacggaatatttgatggagagatagaagatcttgtgcatatggactagaaacaggcatacatgacaggagtatgctctgtgccctgccttagctcagctgcatgactaggttgactgagtcaggtagggacaagacattgactccatggtaaagaaacatttcagaaagcagctttagcttttctcagctatctggggaactataagtaattcagaagtgcaaaactggagactgaataagtagggagaccatatgtcagcttcatgatatttgtcagtgtttttgccttggttccaatttgttttgtgtgttttcatgggagtaaataaagtaattaattatactaggaaaaatgatgtttacaaaatagaaaattgcaaaggaagataagttggtgatacggagagaaagagcaactacttgggtctgagtagtctggagaggcacagttgtgtcttaatcgggttgctgtcaactgctccccagtcagtaattgtcagtgttctttgaacctaaattgtgcattcccttttaaaaacaagggcctaggcaggtgccatgacagtttgcaaaacatgatttcagagagaaacgatttctgtcttcatctttctaagctggtgcactgtccctgtctctgcatcatttcctccaaagccattcctgtgttatggaatattgagaaagttattgaatccctttctaacccaatcagagcctcagttcagtttaaggaaaacaaaaaccttaagaccaagggctgttgtaaccttcagataaactgaacagggagcagatatcttatttatcatgcttggctttgatatatttaattcttatagcaaatgtgagaagttaagttttctcagatccatttcatagaggaagaaaatgaggcccaaatccacatagcagattagaagccacactagcatttaagctcagatttcattttaaaattacataagaattctctatgattttgcatattgtatattgtatactataatatattaaggtgaaacaccacttactgtatactacaatatacaataagtatataacatatataaatatacaatatacaataaatatattgtagtatacagtaagtggtatttcaccttaattaatatccatcccattgctagtatagaccagatagatgtgactcctccatgtgagggggttctatgtcaagtgctccaacttccaaataaccaaaaggagagcctgaagcttcagagaaggaattgaacacaagaccattagaaggaagtacatgtgtgtctgtggaaaagagtgcaggtgatatggaggggagggagctgctgcatcatggtactgttttgtaaccggataaacttacacaaatgtagaccttgcccccaaacagggagtttggctttagtactagcttacattcagatgtggcaagtgaccatgcctgctggctttctcaatggaagagaatgttgtaaagagtgctgatatactgtcatgcttcaacctttgcccttagagagctaacatcttaaaatctttgaagctctgtgtcttagatgttctagtgatttttggcaacttctggcctgaaaacttatattgtttcttgttttgcaatatgtctttctgctatggttgtcagtctctgtgcctgtcaatacccgtggtgtctgaagcttaaatcaggagaaattctgtcatcagcacttcctacctctacaggctctgggactgcaaagcctggtgtctgtctgctctcagcctggctagagcttctataagccccaaggcaagatgctcacagggaagcctctgcctccaccacccaccctgttcacagactgaggactgacaggctgctggcttcacagaggacacccaaattacaggaggctaattaacctcctgaggtaattaggctataattgatttttccaatgaatgtatcagcaacagaaggtgttccaaggctcctaagggtaattttcatattgaggatgttgtgatattaaaggacttcttgggaagagacacacctgtactgtgctccaaactcattcaggcatgtcactctggtaaggacatatggcaggaagtacctaggtctggaatgactagtcactattatctgtcctatttttctttgatgttgtatctcttaccttcaaccagaccctccttcatctgtgagttgttttctgtttcttctagctagtcacttatgaaataattttaaatttataaaatagatacaaaaattttacaaagaacattcatatcatctttacccaggtctttcaacgttaccatcttaaaaaagaataatgtaattatcagttaatgttgatctaatgagttaatatcatcatccagcatatatactttattagcattttcctagttgtcaaatggtatctttttctgatgcaaaatccaatgtaaggaatctgggagccagtgtgatgcttcatgatggcattgtcttgtccctgtggtcttttaatccacagccctaataacgaccttcatggtactaaagagttatttttgttgttgtgttgtctattgtgttgtcagtgtccctcaatgtgggtataccagatgtttccttgtggtttaattcaggctgaatactttgggtaagaaacattaaaagaaagaacatagtaaccaacttgagggagatctgaaaggaataagaatctaccagttcttgctgatatgctcagacaaacatttaataggaagggagatgcatcttcatactagtatcccaactaataaatatagaaagagaaaaagaaagtcacagtttttatgtgcacagctataactgtttccatcaaggatagcctttagatacaaagatggggtgaaagctgatgagaaatataatattcatacattcttgagctatcttcccataagataattaattacagtaggaacaatagtagcttcttggtgaagaaaactgaccaattctcgccccacctcaactaaacagtcttcacatcaccaaaacaaccttgaagaccttctaatacccccgaaagagtacaacctcttttctgtagcatttttacaataataatattttcaaactaatcttcaagaggaatccactcttttttttcaactttcttgcataatccctttgtgctgacatagctctttttttgaatctcataattatgatacctctttgtattgataatctttacacttattctcccttatcttcaggatatatgttgtccttagtaccactcagagcagccaacataagccactaattatatgatccttctaaatggtgcttgggaaggtcaataatttgcccaaagtcacatatctggttagcagtaatacagagattgaaaactagggctctttgacactgggagcagagagtatcctgtgctcatacactttcccactttactccatctcaaagtacctctgtgtgtccagcatcagaaagatcctcttagaagatatcagcaggcgtctgacttactgagtactgcaacaccctttgaaataaatcttaaagtcacctgtgcttaatttttgccctacacaatccagttcagccacatttctatgaatagaggaaacagttcaagaatttggggatacatgtgggcttaaggcaaatatattttcccataatgcctaccccacatgttatgtgacatgcctttgtccacctgtgcaatagtgatagaagtgaatcttctgtcctctgggttgagatctgacctctgaggcatctccatctggcaggagaatccagattgtgtgcatctgtaggctgggacagaggtcaggctaaacaaggcacagaagttttgagaaacagaggcagaatcacagaggtagtgccccaaacagtgactaaaaacctactacacttgaaatctgaaagaatgttcccatgtgttcctaaacccataggcttcatgctgcatttcccaccaaggatgttggatgccaggcaatttatccattgtcaactatataaatttcacttattttcaacctcagtacttctccagcctcattagtccatgcttatggattagagattctgtttaacttatcttgggtacatgtaactgagatagaaaaaacaagtataaaacagtatatattttcctccaaaattaaggataaataatttttgatattgtattagtttgaggatagatcccttctgtccccctgctttccatatgccaaataattataaggagattgttttgctcagactttctcagatgctaatgcttttacagaactacatgagaagctaggacagttgcaagtatttagccaaacagctgcaccacatatttttaagaaagatgaaaatccacctgcccagggctggagtaactcactggaaagttaccaataaagaagtcagccaacttccctgagaaaccagccagcactctgatctcctgttcatttatttgcaggcctcattaatataacatcactgcaacaaacagctaacggggggtggtgtcaggatgaataatggagtcactctgctgagataacaattaggttttgaatgtgctatcagctaagacagcgttagcaaggagtcacctgaggcagaagagctggcaccattgaagtcatagattcctgcagagctcctcatcagctctagtgatcatggagaatgtgtacatgcacgatacacacacacacacacacacacacacacacaggcatgcatgcataagttcattcacatacacatgaacacatgcactcaagcactagcaagttggaaaagcacatgatcacttgctgtcagggactcggtgtttaggtgtgcctgggaatcagggtagaatagaaacttgcatgtgtacagttggaattatcaggggcattctatactacaggaagggaacaagaattatgacagaggagagctggctatataccaatacatctgtatataccagtgcagtccatctgtctgctcctagagcacaatctctgacacagagcatctaatacatacttcgtcctcccacatagaagttctggtgtcagtctctcctttctcttgcaacctcagaagtggatatttacaccatggagatcaaggcaagggctgcacaggtcacagagaggcagcatccaatgccacaaggcaggatgtgcacttgaatcaagtccttgccaagagtattgcccatctgcatagaaagctcataaagagcaaagccattttttctttcagccctaagctaacctggcctctgtatgaatttcttagttcttagatggtgatacgaaaaataaaaactacattcactgaatgcaatactgattgatcactcttatgaaactcattttaaagatgagggttatgagcagtgataactttcttgatgttacagcagtaattttgtttaaccctcagctgcttggccctaccgcaccacattgactggggtataatccttcctgtctcctttaaactctcttaggcaaacattattctctgtctagaaacagaagggaaaagagagctgaaactaagttcttctagcctctactgagataggaagaaagccagaagttctgccctcagtatcatctagggaggctaggcatatgtggtaggtagagaggatagggcaagccaaattaagtgtatggacagggagaagggagatggatggtgggaaacacagaatggaggagagagcagaaggaaacagtgaacaccaaagccaacaatggggctcccagtaaacagggagtcatagcctcagccaaagaaagaggctggctggtgctgaacaaagggaccagaggagagactaaggcaggtactcctagctggtgacttgatctctgcagggttagggacagttagctcagactgtgttgtgtgaaaactaaatgtacacgttagataggtccactgcattctgtcattctgcatgcaacagaatgctgtttcacacctgtgaaatgggaataataacacgctgctctagtaacttgttttgaacccaaaattggatacaatatataaaaccctagatgcaatttgtctcattctgaacacttcataagtaaagaaacagcaagtatcattatcagagaaatcccccatcccttggaggtgatggactgttgtttctatcttacttctccttgtccctgtaaaccaggagacagtcctaaagaatactttgtttctaatttgcaagccaagctttgggaacctctcatcaagatcgtctgactctgagggaggcctgaactttgctcctccaaggctctacccaggtcctgcctgagtctatcatcgcatgaagcctaatcactttcccccaggctgccaagcccctaagacctccagcaactcccactctgcttcttcatgcagccctttagatccccagctgtaattaatcagctgcatctgctcttgcccttgagcagctttgtggcacagttccctcgaaatgttcaattagtggttgcaagaatgagggcagttgtagcatcactctgctgctttccaggtcatggcacccacaaaggaaaacaaacatgacagagttcaaaaaggatacaaagtgagctgaagtgcctctagggtgctccatttgactgacagctattgaggtggggtctgagcatatagaggagtggatctccaaaccaaaggctcccaaagctttggaggctccagaaggaaaaaaaaaaatagaattctcccataagtcgtcttctgtcagcccatgatctgttcccaataatgcaatgttcttttacacactgctgtctccattagtctggcttagcgtgtactaagcaacaggtgcatggcaggggcttagataagccacttcatgtttgagagagtctagctagcacttattgctcttagactgagccctaaaaatgttccccttagatcctgcaaagcataggctatctttcctctccagaactagataccaatcatcttaggacaaggtgatagaataatttaaagccccatgtcttaggtttttactgctgtcaacagacaccaggaccaaggtaactcttatgaaatacaacatttaactggggctggcttacaggttctgaagttcagtctattatcagggcaggaagcatggcagtgtccaggcaggcatgatgcaggaggaactgagagtcctacatcttgttaataagactggcttctaggcagctaggaagaggctctcaaggcccacctccactgtgacacacttcttccaaaaaggccacacctactccaacaaagccacacctcctaatagtgccactccctagaccaagcatagtcaaaccaccacaccccattaaaatgcaaatttagagtaaatatggtaatacctgcttgtccgaggcaggaggatctccaacaaattcaaggccagtctgtgttacatcaagagagcctgaccaaaagaacacacacaacacaacacacacacacacacacacacacacacacacacacctacctcaaaccagtcatactgtttatgtgaccctcatttaaaattatttttctgaaaggattcatttagttcattgtatgatgctgcatctgcctcaaataactaataaccacggaaagaagtactggcaagaaaggaaagaaaaaaaatgaagaccattttggacagtactttcccatttgttgtctgttaaagaatgatgtccagctcagagtgtgtttccatacaagattcagaaggccctggcctcagtactacctgcttcctggccaagcttgacctgcaggaaacttctcaggtatcctccagccagcaatacatgttatttccacctggttactaaacatctgtctttgatccacatgttttctttccagatcagcaggacaattcatatcatctcttagttccccacaatccttaaatactgcattcttctcatctgtaagtcctgtgtgtagggaagcacagagcaggaaattaccaattgttatgacctgcactctgaactaacatgctggatttccaaacattagctaatttaatcctggcatccttcctttgaggccagcatgattatcagttttcatatgagcttgttcaaggccacatagctttctgaaactctgacttgacttttcctgctctcttttttgctgcagacactgcctgggtactaggtttcacttccttaccccagagcactcagaagcacacaggccatctgaaactggaagctaagataggcaaatatacccaatattccagctatgtctgagtatattctgtgtcagtctgggttcagtgttactcttctaccctcttaccatcttcctaccttcctctgaggttccactgctccttttagagcaggaagacctttcctgggctttttgcaggcaataagtggacacttagaaagtttgccactatagacccacacataaatgccaaacctagcctctaggttttaagaagtgacatcatgggcatcctgcaatttcttgctacttctaagaaaaaaaaaaaaaaactctgaagacagactcactggggaggagcctggggaggagcctggtttgacaatattgtcctggcaagtattattctttccttctctgaagaccaaatttttttcactaaccctcctccttgcagcctgtgcagttagttctgaggaggaatgaggatgtgcatgccaggttcttgtgacttaggagccttgggctcttcagacatctgggaggattctggtagacgggcttgtataggatgttttcttgtgtcattttgttctaagcacagattggcaacctgactctctctgatttttgaacttagggaaagcaaatgcattcaaaagcagaggcggggaggggggagtgtgggatnnnnnnnnnnnnnnnnnnnngccataagaggatgtcaggtcctctgagctagagttgagtacaagaggttgtatacaacccagtgtgagtaataagattcagtcttcaggcctctgtaagagcaataaatgctctgattagctgagccatctctccagccttgacacagaaatgtttaaagtccatgctagtatgggaaccactaatctctggcaggacacagaggccatattatagaatagaagatacagctgaagaaatgaaggagaccataatctaggggaactttgcctcaataatgatcacaaccactgaaccaagtgactagaacccttggcagctgtgggatttacgtggaggaccatggagattcttttggttagaatgagtgaaatgatgaagtctgcttagcatctgttcatacataggagtgagaaccgaaaggactttgaccttattaattatgcatgacaggagaagggaaagtaactattgaagatgcttgcaaattttctggccaagagcatagtgaccccatttaccttgaaagaaaatctgaaaggataattggacttgagtagaaggaagaaaaattaagagtttatttttagatatggtgaaacttacgccacctgatagacatgcaggtggaagtggaaatgtcctgtagcaattggatatatagctacggagctcaggagagaggtgtgagcatatgacaaagatttggaagtcatcagtaatggaggccttggaaactctcctgcaaatcggatgatcaccagctcatttatagcttgaaaatccatagttttatagatacattttgttttaatcaaaactgtaagctatgcatttctttaagcctatggctgtgtgctgcttagttgctatttactctgaatttttgggccacctattccaagtaatgacaatataagctgtagcctaaaaaataggctctcttgaaaattaagcttccccagcacttcccaagactagggatgtggtctgaaaatctagagagggcctaatttgcacaccagctgctattggactcacacgtatccttgacatctacattcattccaagattataacacatgctcataatttacccaagaatcttctttgtactgacttatacttctgagagctcagtgcctgtagcttgtgtctaactatccctccatgttggaagaaacagctgttgtgactgaacagcaggggagctgtactgtgaaaccttccagaggcaccgagtactcatgtgctacctgcaagacaagagtatttttaggctttcagaaagatttcatttcacagtttttttctgaaaggttataattaactgcagtgaacaaaagatttttttaaaaaataaaagtgggaagaaaggaaccaaggaaagaaactaaccaacacagctctgtctaacccatcggggagccatgcatgtgctggggttggggtggaggtgggtggcgcactggtaagccaagtccaaaaaagtccaagcaaacccagaactaaaagcatgttctctcccattgatgctacttaaaagatagaagtagctccttcccttgcctctcatgacaagagtttatcttccaaggcaggatctctggcctctgaaaaactaacatgctaagaagtacatccagaacacacctttttgggggacattttagagtttccagggacagaagacccacagaggcttcttattcttgctacctttttctcttctgtctttcacccaccccccaaacacattgatatgtctgtgagtctcttaggcaacatctctcttgatccattccatatgtttagttttatttataagctgaggtattttattccaagaaaaaggaatcaagcgtcacagacaaggtgatgtaggtaaaatgagtcctcagaatagcgttttggggggcctttcaggcaagaattcagcagcaccattgaaggtttgcagaaatggatgggaagtcagcaggctaaattaattctggcttgacaaagtctgcttggtatgccaccagtaataaggaagagctacccccacccacactccatctctttcttgctagctagaacatgggggtccatgtctggaagggtagcaagactaagtatctctgaggaggagtggcccctttcatctggactcacccatattgactgttccatccctaacagggttcaattgtgttggatggtcttatgtcaacttgatataagctaaagtcatccaaaaaaaggaaatctcaattgagaaaatactcacttaagactggatcataggcaggccagtagggcattttttttaaattagtgattaatgacgaagggcccagcccaccatatgtggtgccatccctgggcaagtgatcctgggttctataagaaattaggctaagcaagccatgaagagaaaacagcagtaagagtaagcaacactcttccacgtcctctgcatcagttcctgcctccaggttcctgccctgtttgagattctgccctcacttctttaaataatgaactgtttccgtggacctgtgagtaaaatcaaccctttgcaacaacaaccctaactcagacaactagcatgtataggcttaagggggagcttgttcaatgtccaagaagacaaagacactgtccctgtcccagaggcaccatcctgggatcttagcagactgctggcctcaatcaaatcaagcctttcttaggatgtagtgataaactgcctttttattgctgtgcacaggttacctaagattttggatccatccctaacacctctagctctccttcttctcactataaaatgagactcctagaataagatgctctgacacacactcacctccacccctaagttgacaattatgaatttctttgttcactcaggatcaagattagctagttacttcaaacttcaggcaactgtaaacttcaaagcatgaacatattcataggatttactggattcctgaggaattgatagtctggcattctgattcttctactcctttccttttgggtaaaagcaaaatgagataatcagcatttggtagctgaattaaagaatgaacaaataaataatgatccttaccagcaggaagccagagaaagattgtaaaatatgaagtcacttctttgctctaacatatgtcatgagtttttctctttctttcagaacaatggtaagcagtatgggtctgtgatattccctttcagccaaatctaatccccacttgttacaagtccctgctgttttccctgtatctgtctgatcactgcagaccctaaactggaaactttgttatcacttccttcctgatttataagttctttgaggatgagtctgtcgagtattcaccattgtatcctacaggatcgagcacagaaatagcaataacactactgtcatagtttcaaagccttcttgtgaacacagagcttcaagaactaactggtgcttccatgctcactctagcttggtagacatgataatactctcctcacagaagaagaactgaagttcacagagattatgtaatttgatcacactcaggcaactagtgaattggagatgcacataaatcagtgatgttcttatgagagttcagaattcttcctgttaagttttgctttttaaaatagatgggtgagtgggtgcattggtgggtggatggatggatggatggatggatggatgggtgaatgatctaaggaaatagtgtaagatagaaggtgatagcaatattctgcacaagatgagaaaaagagaaggcactcacattctaggagtctcaccaaagttcctaagtactctgtttggggagggaaaagaaacatctgttcttgtgaataactcagctagtggctaacagcacctccctcctacagattttgacagtatcaggaccacctgaaggagggactcgtgtgaccatccatggcgtgaacctgggcttggacttctctgagattgctcaccatgtgcaggtggctggagtgccctgcacacctatcccaggggaatacatcatcgctgagcagtgagtccaccctggcctgctggcctttatctgtgtgagcttcagagtggagagtctctgtatttccttctctgggactttcccaagtatctttcactttacctcctcctgtggaaaatgtcccaagaagtcttttggggtctttctaccccccaggaggccttgttctagttgcttccctattctactctcctcaggcatcggggctccaggtgttcttattgcctctcatttagtctttgtcagcctgctgccatgaatggtgaaggccccgtgggaactcttggcccctcctatcccccccaccccccattgaaatgcacccttccaggtaggctgtggacaacaatttgtttagtgcctggggctctgacagtagcttaatctgaacagggcctccactggagcgaattcatttatttcactaagggaaatgtcagctggaaattagaaaataggcatgtagtggcgggcaggcgggcaagctcaggagtgacatatgtttcaatgtggggtgttcccttggcagtagaaactacagtcagtgagcaggaagtggtccagaagtgggggtgggctggggtggatgaaagagaaggaagaacaagggaagggagccaccagagcatccttcatgttctgtcatgtgacatcaggtcaagggctcctccatctattgaagatgcaactttgtgtgtgtgaggagccaataagatcttgtctttaactcaggattttctctcttaccctgttatactgcagcctcgggctcctctgagagctagtcctcaatggcagtcataaaaatggcatcactttattttccatcagcgttttttagtgtacagaagaacacttttctagccactatttttttttaatttttctgactctggcaaataaattactggcaagagtaaaagttgggaagattattttctccagccacttgggaagtaaataccagggcagactcagaactaaaatcttctaactccttgtcagacctatttccctgatgcagcaaccactggcgacaacttctgggcaaagaagacttggatattccatgactcatccatcacccatggctctgaacctcaaaggccctttattctagcatagctcagagaagggtcagtggcagaaagggtaaattcccagactcttgggtgaactgtaagagtcactggccacaggcaaggagataaagctggcctgatccttcttttccttcaggtcctgttctttattgataaccttatccctataaggaatgagctttgagtgagtgatggctaggcctacaaaagagaaatcaggaatgcataaatatttctagggaaccacattaggagataaacactggaaaccaggacaacctgccggaaacctcatggtcacatgatctagagtcccatgccatgcaaagcttcaccaggcacttggacacacagaccccaaattcatctggaccttaagaactttccatggtccaacttaggggcttggaggactcagacgttagggtgagaagtatgaagtgccaggcagctggactcaaaacttgcccaagttttgaattaaactgttttgaccctggctcccctgctaaccagccctgatactttagcaagccatttagtctatgaccttcatctcatgggtggcaagaagctttagttctgtttatgaagtcaggtatacttctttacccaggaatatggggaggaaagaacctaaatgatctgtaagtgcagtcatgacaggaccctggggaggcagtcattccaggccagttgaggtcgatggtgacccttgaaagtgatccctttccttgcggcaggcacaggacaggcaggctggaagtagtgaaggacaccctatgcctcactggttgcaacctggtttccagctgtgccaggctcattatcactcctaaggtttcagagtttgttaacatcgttaagcctccatcctgggcagtgagcagcaggtgtaatcattacagatgtctgcaagagatggatttggctaactgggctcagtacagaatcctggccacaaacaggattagcgaatgcggtaatgattcaccatatgcttgtgtctgccatctattattccacaattaggttaatatcggtttaaaggttctgattagtcctgaaatcaaaaccccacatgtctgtggagggcaagatgattcagccataggacattttctggacagtgaaatggaggtccagacttcaactcagtatctccagagacaagagtttcctttcatctgaccttcctctcctctgctctatgtgtgaattcaaactcatctggatgggtgctgaacctctgtgcttcccacccaggaagtgagccaccacttgtgcatgtctgtcagaaatagtgtggtatgggggtaatgagaaaactgagctggtgccaggagcctgggggcaagctatagttcagctactgatgaactgaatagcattggacaagtcactttgcttcttgattctcaaatagcccatctggaaattaggaccagctgatgtgtacaatcccctaagtggtcctcagaaagctagaacaatatgacccatagaatctgcaaaacacacacacacacacgcacacacacaccaaccagaaaccagtttgtcaattacaagtcaaatcttcatatggacactggacagttgtttggcttaattcattttataaggggaaaatttcactatctctagtcattgccttctattgatatgtagggagcctcagagaaaccaggaacacagaggacatggaaattgggaagcctctgagaaattaaaccagagaatacaaatgaggcttaggggacgaagtaaaatatatacccttatgcctgtggtggtccatagccaaggggagacatcaagtgactaagtctcaggatcctaggaaatgagtggggttgttccctatatttgccaaaacctttcactagcatgatgcctgtgctgtctctcccttaaagcatctagagctttttattaaatccagcatctgagacacatgcctatgaatccacctactcaggaggctgaagcagaaacgctgcttaaacccagaggttggagaccagcctagaaaatgtagtgagactttgtccaaatatatacatacatacatacatacctacatacacacacacatatacacacacacatacacacacacacacacacacatatatatatatatatatatatatatacacacacacacaaacatacagatatgtacatacatacacactatatatatatatatatacacacatacatacacacacacacacacacatatatatatacatacatttatacataagataaggatccagtgcccacaaactggagtgataaaaggcacaaacttgaaactgaggctcacctttctttcagtcaggactccttcccttgctgaaatgtggccctaaataagtcatgaagcatccctgaatagtcagagataataagacccttcccggagcagaggactaatgtgatgtttggtcccatcttgtgggccacctctgccatcagcaactatagctctagttatttagttacaggttctgctgtggcacagtccctatttttctacatagccctttccacttctgcggcatgtttcttctgtaattcatctccctcagcaaggacaggtgtcctatgaaaattcaagtcctttccaaattgccttccagggctcttgagtgaaaggggaaaagaaggagacacttgcacttcacccacagtgctgcttagttttctgagaactcctgtctgacttcttagacatgctcatacaaacccttgttcgtaccctactcctgatcccagtcctcttcgtacttacagtaaggtgatacagctcagttgctaaatgaggacattatgccttgggcccactcaagcatggatttcattcagagccagctacagatacttagtccagttacttggattggctccatctccttctatcactcctctttcaggggctctatacatgaagtttagcttttggaacatgaaccccaagcaagaaaatgtttagaacctaagaatgcaatgtgttcagacaattcctaagctcttcatgggcagttcaacaggccagactagaccttctcctctctgaaacaggccgatgcccaaaaccaagagttcattcttgcttgtaaccttcatgtgtcctccaatttcctttttccacaatttcatgcctacaataattgcttcctccctctcctgtggagtatctctcccacagagtatatacgggccttgaatgaagaaagagccagtcttgattagaagaaatgaaaaagcttatatgcttcccagtccccacactcactgcccacaagaattagctgactctccagagttcttttaggggccaaagagtgagctgtagaaaatcagggaccccaaaacaaaagcagggtccagcaccagaaaacagtatttgagttgttactccaagcaagtatcagcatgaaaataaccaaatactatctcagatgcttcactaatgaggtttaaggagaggactatataccaacactaattgattgttgctatcatgctatgtgggttcatagtgaatttatttattcatagatagttattgtatgttaggtaaatatttaccagcagtcaatgtatttatttgagattaactgttatgaaaaaagacagaaaccagtggtgtgtgtgtgtgtgtgtgtgagagagagagagagagagagagagagagagagagatttgtttaatgttagttttattacattgaaaggaaatctttgtttagttaccttctttcctagagaaccaattcagataaaatttgatctgttaaacacaggtcttcatactgtgccaggataatataggaaattagtgaggaggcgggttatttttctgatcccccactaagcaagcctagcatggacacatagacactgcttttgcaatctgaaatggtgtcagaaggcaagaagaattttccttcctcatttcttggccccctacttgctgagactggtagaaccctttcctacccatcccctacagcccacccattctgaaaggcactgtgacttaaagggactagtgttcttctttgacttatcccaggagccagggaaatcaccagggaatattgatctgacctgctgagaaagtgcagaccatcttcctccagtgttccttacaatgggagacgtgacttctaaccaaagccatgtcacccactgagtatgctcagccttgattaaatgtcaatcgttacctaatgaactcagttaccacccatgtccatgaacttctctcattgtgctgggagatgctatttggatgctcacattatctcatcagattatctacctgcttttgagagctcactgcagaaaacaaactacaactgaatcagtgtgacagtcattcacctgtgcccctagggagagctgctgcgtttgcttgctgcatagcacaaagcatcaaataagtaacgcccctcaatctctgttggacagtccactcattccaccaatcctaggtatgacccatggtgaggcactgtactaagtgctcacaggaattggggcagaatgttataccagaggcacccacagctttttatatataatcaaatccaacctctcactgtagcaagaagaaaaagcccaggagttcaatactaaactcatggtcacattggtactaaactaagtcatggcctagcactctgacaagacagtgatgggtcacccactgactgctgagcaaatgagcagggactgcagccttgtcaagcctttcactgggaggtctgttgtcttctcaggatcgtctgtgagatgggccatgccgttataggtaccacatctgggcctgtgcgcctgtgcattggggaatgcaagccagagttcatgaccaagtcccaccagcagtatacttttgtggtaagtaatgggaccaaggttagccacatagccagcaaggacacatatctgttccagacttctcccagggaattctcatttggtcctcctagccaggtataccatggtaaccagtaaagggaatttctggcctccctgcttggaaggctgtctttctggggttgtatagtcacatgacatcaaaacaaaacaaaacagaaaacccaaaaactttggagtctcagaggaccacaggtcagagttctaagtaaggcaaaaacttaagcctttcttagaaaatggattctagatgaaagactaggctgccttttatccctccatgtgacattgtgatctcattctagcttaatgaagacacactaattaagtggtttatatttatccatatgctttgatttttgatgaggatattttaagctaaggattagaagatctctaatctggaagagatgtacctctatacataacaccagagaggaaacatatgagctgacagttctgtgtgtctatatggttacatgtgcatgtatgcatacatctaaaaacatttcatcaagcagttttggtaccaaaaatttctgtgaagctggcactaaattaatcccaaatcaataaattgcttctgaggtcctgaagtctcccttggctcaattaatcctgaatcaatactttgtattgggagcccttaagttccttttctaaatcttacctacatcctcacactgggtacttcattaaaaaatgttaacaacagtggatggggtcaaaccagccttactaagagtttttaaaaatcattaggtcacaaaattctcttctttctaaagcattttattacatagtttatgaagtttccaggcctagattctcattttagcattgctgcccttttcctggtactttttctctctcagatttgccaaactgtctgcagccactgtgcctcatttccttatcaggggacatgggaaacaaaaggaaaagatggggagagaattataaatatcagacttgcaaagggccctaggcccatcaaactctcctcaactgacaaaggagcaagctgaaatccagaataatcatatgacccacctcagggccatagatagtgaggagctggtacagactagaatccactcactgagttaaatgcacttcacaagctatgtatggtgtcacatgcttttcatcctagcactcagaaggtgaagacaggagggtctccagctcaagagcagcctttgttatcttgtagtgagactctaacaagataacaaaagtaaaaacaagccgggcagtggtggcacacgcttttaatcccagcacttgggaggcagcagaggcaggtagatttctgagttcgaggccagcctggtctacaaagtgagttccagaacagccagggctatacagagaaccctatcttgaaaaaccaaaaaaaaaaaagtaaaaacaaaaacaagaaaaacatactttccatatcactgctcactagacagaggcaattctttctgattaaggtcaactgcttcatgcatgataggctagagtttcatataattaatttctttgacattaggcttagtgagcatgcttgcaagtgatattctcatctactagtgagggtcagagaagccatgtttaacatttattaatagcaccaagaatgaggtctcagtgcttagggaaggacaagagaacatatacatagaccattcatagaggtttcagtctatcagctgcccaacttaggcaagaacattttactcagccctattgatattgtgccaaaaaaccttagaacaggctctatataaagtagcattgtcaaattggtctcaatatgcaaactgctttatagataagccagtgtcatatcagctttctcttcagtactgtgagtacaagactccccaggaagtaagttaattccaaggtatggcagcccttcaccttccctagagaaagcaatgatgtttgggaactactgagggcaggaaaactaccttagctcccagcatgattgttatccctcttaccattaggtctatccttggacctaagctaggaatgtttctctgtttcttttcaaagaatccttctgtgctgtcactcagcccgatccggggaccagagtcaggaggtaccatggtgaccatcacaggccattaccttggtgctgggagcagtgtggcagtgtacctgggcaatcagacctgtgaattctatgggtaaggatggtgtgttgttgttgccttatcatgcccgttacctcctcatcactggtcctctccttggctcaaacatgctagtcattgttagaaatgtatgccacttatcagtttatttcccatagattggaggggctggtaacatctaaagggaactggaggcaagggttattagaacagataaggaataactccaggagctccccaggctaagtttcactgtaggaacttgagactcatggaggtgacatggtcttagcaattttagcatagatttgttctcaagattatcttctgtgcatcaaaaaaaaaaaataacaacaacaacatacctaatattgtcagctacaaccatgagccccgaggatgcagacttaaagtgaattctgaaggaatccatggattaagccccagtctgcccagtgttacctacctgaaagctttgcactataaactctaccagaataagccttctgtttttatcacaacagaggacaggaatatgtattgacaacctgactggaccctaagcattgattagtcatattctagaaaaaaaggatttctcaaaactctcatagagccttgtctctgcccatattctttaaactttctactgtgctcccttcctcatccagcgaaggtaaagtgaaggtgctgatggacactggtagaagatatttctgtagcacaaaaaagaagacagcagaatgtatcatgggccatacatagtggaagggtcatgcctttcaagctagttcatgcccatatcttttgtcttaacccttctctgtttctccatcaggaggtcaatgaatgagattgtatgtgtttcacccccatcatccaatggactaggaccagtccctgtctccgtgagtgtcgacagagcccgggtggatagcagtctgcagttcgagtatatagatgacccacgggtccaacgtattgagccagagtggagtatcactaggtgagtgagattggttacgtacacctaaagggatttaaggttagccaggcacatcatctggaagacagtgtgattggtggactgtatctggaggaaggtgaggttaacagagggaaatggtgttacagaaccctacagttcaagggtggctcatattggggacacttgtggttgaagatcagtttaccaattttacctaacctagcttctgcttatttccagtgggcacacacccctaaccatcacaggcttcaacttggatgtcattcaggagcccagggtccgagtcaaatttaatggcaaagaatctgtcaatgtgagtaacctttggtcttcccttcttggcttcagtaacaatggctctctggccagccttgcaaggccaggagctagaggttaggtatatgaatgcctgattaatagacaggggaaatgattgaagatggttccaaacacctgaaccatccagaaactaatgtgatgacataatttcaggtgatatagcaaaggtctaaaagtgctggcagctgagttccatattgcacaaaagggttatgttcacttcagtgaaaatgttcccttaaaggataaatgagaaacagtgtggggggtagaaagaagttcttcctccacatttagcaacttctgtattggaaattaaaatctgacatttatgggctgtatggctccaatcaagtcctttaacttctctgatcctgtgctccttataagtaaatggctgaaagacttgctttgaagtgtctgaacaggccatccatggaattaatgtttatatttaatgtcagcagacagagaattctgacccactggcaagatgaccacagcttcttcagtcttttgcatagctgcataattttattccatttagctatgagtgtttgtgaatttcaaaaagttctcttattctgatgaaaacagaatgtctgataagctactgaaaagttttcaacttgttcctgcagcaccatctcactccttttatcatgcattttcaacagattattatattcataattataatagagaagatgctgtattggctgttattactactgtgaattacaattattactctgtgacctttgggatattggtaaatctgagatggacaggcaaaaggtggaatggtgtctctccttttatccctgacatatgtccagcctgctgaaagcttccttggaaaacagaggtgctctaaataacacaatgctaggctagaccaaaagaaaaatgtgttaaggattatcaaatcccacaccttcattgcatagaggagaaactaaggccagatggatcgataacttgaccctaagtacaaggtattcatggctataacttcccaccatgctagaaatgctcaacacttttagcttggtaaacacattctcccttcatccaagttcagaattggaatcataggaagtacctggactctatctgcctcctgccagctaagtctttcctaagcccccagtcattgttgctctgttaagtttctagggcctgatgggagctttgaactcatactcagggaagataaaccattccttctccaaaaactaagtacaggttttaaaatacagattttattatcattccaaaatagccgaccagaatacaacttacagataaattcttacgagaaggatcccttatgccaaggcagcaacctttaaggcagaagaaaaagctggctctagcttctcttagtcttcatagaaaggacggtgctacagtgccagaggattgatttgtgtatagcagttggctctaaggcatgagggtctcttcctgagtccttggtacagagtcatgggataattagggcatgtgcatagtatgacatgaggtggtttgggctagggatggctctgccatttgtttttacatgcaaagtatgccaccaagttgcaaggcttttactgtctcaaggtattgaccaacctggggaggaccttctctccggttaacaggatcaatataaggcaccaataaatacaaaatgagatgtgagtatagtatagagagaatgctacaatgttagcatgagggcaacaagggtgactcccaaaagctacagctttcatcctcaatgaaaaaacaaaaaatatggcttcagcttccctattatatgacatcctgaaaagaactaaatatagttctaccttctgggaagaattggagggctctaggactacatagtgacctgcttgggggtagccgggcttgcaggcctgaatggaagcatggaggaaggcagtgtccctagaacatggcctcaaagcactgcccagtgcctctgtttacagtaggaggaaagaagtactttgcccttttgctccatttggtccccaccttagcctcagcctggagctacccttttacttgtgttccaagttcccaaatagacagtgagggggactggcacaaagcctcaaaatgcatagggaagttgacaaaccgtactcacttcattgcactgattgtttctcctatgcctatcagtatccccagatgcaccatgatatgggcattaagttggaaagggacaggaatggaaactgatccctagaacagcagaaaaaccagggaagcagttttgtttggaaggattaagactgatttgaagttctgacatcacttctacataccagctcttttctgtgctgtcaactgtttcacacaggcatctgtttctggtcatgaagcctgtctgtgtatatgttcacacacacacacacacacacacacacacacacatgcgcgcgcgcgagcaccacatgctaggtagaatatactagagtgttctgggctattccctgtgacagcccggttcccacaatgatactgagctaactgtggtgcagagtaaaagttaggagagcaagctggaatctgctttttttccccctatgccctgcaatgggtctgttagtagtttctttggttggatgttttcttagcttcagaaccaaccactgcggggagaatagcagatggtgctaaccaggcaccagtcagtagaattttgatggcagaccaagagacaagggagaacatgaactcaatgtcacttctgagtgcagatgaaggagaatgtggccagagaaaagaaagaaaggccctgagtggcagaattctgtctactgaccactttgtgctgaggcattagctgaacactgtgcaaggcacaaaaagctcatctcaccactttctgttccacaccaaatactcccacccctaacccccacacatactcccttactgcaattgtcctcttcaaacattcttacatcttcagtctttgcatttgctgtctcctccagctgaaacttattcctgcgctactctttggcctaggtaagcctcttgttctctagataaaagcattcactacttctgagggaaatctttcatgaatcccgctttaggccatgcacactcacagactttccggagcatctggttcctcccaccagagtgttcctcatccattcatgcatttcacagcatcgtgccctgtgctgccccaggctctctgtggagtagcttataaagcttgtttaattaatccagagctgtcccttgggactacttcattctgtgcaccagactctcagcccagtgtctgccagaaaacaggtgctcaaaacagtgttaataaataaatgagtggggttaaatgcattatcaccacatttttcttaagggcctcctatgtagtgaaggaagtcaagcaaacagagggtaagaggagatgacagaccctccttcacccaccaggtgttcaggtttgaatgctgctctctgcttccttaggtatgcacagtggtaaacacaaccaccctcacctgtctggcaccctctctgaccagtgactaccgcccaggtctggacactgtggaacggccagatgagtttggatttctctttaacaatgttcaatccttactcatctataacgacaccaagttcatctactaccccaacccaacgtttgaactgctcagccccactggaatcttggatcagaagccaggctcacccatcatcctgaaggtaggaaacataaatggggaagaaaaacctggatagtggtgggagagagcattgcaggcccttccctcttgagaaggccagatctctagatgctaatacacaggagtcttgttgtaccccacctacccttaaatacgatgtgtcctcccctccacctatatctgtccattttttctgtgtttccttttctttcctcttcttcctctttcctaaacacctcctttttgggggggggggtcctcctttcatctatgactggttcaagtctctttaaaaacctatcatagaggcttactggtttttacatttcttccccatcctgtctcctttatctcttttaagtaggtaattattttctgcttgcaaattccagttctcctcattaagacacctgttctctacagggcaaaaatctctgtcctcctgcctctggaggggccaaactcaactacacagtaatgattggagagacaccttgtacagtcactgtgtctgagacacagctgctttgtgaacctcccaacctcacagggcagcacaaggtcatggtgagtgaaccctcttctgtctctttcctctgcccaacctcaccatgtatacatgaagaaagcttcccttcaacctcagttctgactcatgccctccatattttatcatctccatgtcctatatcaaaatggatagcagttgggtacacctgagtagaaaggcaaatttcaaggcaagaattacttaatatccaaatatgcgccatactgtcatagtctaccctgccattgctcacactataacactgtaggatatgatagcactccagggctctatacctgtgtgtctgtgtgtacaatgcacaggttcacgtgggcgggatggtgttctcacctggctccgtgagcgtcatctccgacagcctgttgaccctgccagccatcatcagcatcgcagctggtggaagcctccttcttatcatcgtcatcattgtcctcatcgcttacaagcgcaagtctagggaaaatgacctcacactcaagcggctccaaatgcaaatggacaacctggagtccagggtggcactggagtgcaaggaaggtgagtgcaggtgcattctctacttcctggacttctccttcttcactaatctcatcaccctccttacatacaaaccttgtctttatctctatcctctttcctcaagccttcatactctattctttcccaggaactttcctgtccctggggttggagaagacccaggtatgcccaggtgtgaggagataggtccattggcagtgttcactgttcctgatctaccccaattcagtccataatttagccagctgtctcttcctttcaggactagtatgtcttcacagtaagcatctgccaggcctcattgtcttagaccagatcctttaattgccagtgttcacccctttctgaatactcacatggaagtcacagccaagaacgtaggagagccctgcctcctccccggcctatcatctcctaggatttgttttctatctctgctgtagactgaatgttccaaaggccatacttgctgacagacagccttgagtgtgaaagtgtgtaggagtggagattgtattttctctcatctcccacacagaaacatccacggggtgactgacaagcatacctggcattctttcaggctgaggacctagcaggctccttgggtaaacatatcaattaagaatcaaaacatttttccttttgtggcaagtggcttttcacaatcaagcaactgttgaacaatggaaaagaactgtactgggagagatgggtcaaaactctcccatctcccttatatcctagcacgaagatttaccccttgacctaggaagccagggagatacttaggagctcttcactgcctggacctaccttcagggtcagcatttgacagccaaggttttcacatcctggttctttttcttcctaggggaaggtttgtttattctgacctttgttgagctccagaagttctccaattgcttctacaaatacctataaagggcctaagtcatattgttctcttctctatattttagccacctttgcaactgtagaagtaaaaaaatatagatagatgatagacagaagacataaaaggtctccatcttctcataacagtttgttactcagattccattcactataacaagtccctgacgtagtcacccagtaaagacagaggagctgggagatagctcagtcacatgcatgagggtctgaggttgatccctacaatccagataaaaacaaacaaaaacaaaaaaacaactaggcattgtggcatgggctcaaaattccagcacagggaaagcagagacaagaggatctcagctcagtggccagccagcttaacctaatttgtgaactccaggctaatgagaacccgtccctgaggaggtgtttctaaagatgtctgtcacctaaggccatcctctggattccaaaagtacacctgtcacagacacttttgcatgtatctattcacatgcatacatacacttttttttttaagttactttggctgagtttggaaattttctgtctctgataagttaatcctgtttcgggaagacctgtggtaaggctgcacatagtggttaaagtgtgtagccaagcaaaaagtcaaagagggagacccactctctaagatctcccccaagtttcatctctcaagttcccaccacttctaatagcttcaagttggagacaatgccttaagcaatccttaaagtcctatagtaaacaacctatggcagaaacctaggacaccttcctcattacactcctctaacctactgcctctctaccccagcttcctcctccagacaaacttttccctctctcctctctcctgacttgaactccttctaagctttcctgtcttcactcactctcacagcttttgcggagcttcagacagacatcaatgagctaaccagtgacttggatcgatcaggaatcccttacctggactaccgtacctatgccatgagagtcctgttcccaggcattgaggaccaccctgttctgcgggaactggaggtactgcatgtcttttaatgatgtaggccagggattcccaggaagtccagagagcagtatagggttatgaaggaaaagagccaatagtttataactgctttaaaaatggtagggaacagtggtttgtgatagacttaaaaataatgactaggggctcgtttgtacatttgttggtttgtttattcaagagaatgagtcagggcagaggaaattacaggaaaattaagctgatagatcatctcatgttgggcccttgggaaatgaggtacatctgttgccaatgctgttcagaacctcaccaccaagacaagtagaggggacccagaagactttaaccctcacagaacaacccccaacaacacagttgggggataaaatggctgcagccctcataaagagggtcctagagcagacattatcactatcatgtcctaagggtctggatggacatccagagcctgtcctctgaaggtcatcctgcatacctcaggtacagggaaatggacagcagcacgtggagaaagccctgaaactcttcgcccagcttatcaacaacaaggtgttcttgctgaccttcatccgtacactggaactacagcgcagcttctccatgcgagaccgtgggaacgtggcctctctcatcatgacaggccttcagggtcgcctagaatatgccactgatgtcctcaagcagctgctctctgacctcattgacaagaacctggagaacaagaaccaccccaagctgcttctccgcaggtctgatccacagcaggggaagggcagtgttgagttatagaccttgtcacataggctcctgttatcctcaacccctggaaatggcttgcatgaagggttgcttgtgattttataccagcccaggatggagtgtgatcttttgctggtcctgggaaaccaggtgactcccaacctaagtacatggcttatcttgggacgcagcctcacaccatgggtgctgcctttttgtggtttggtttcctcataaacaagataagaggaatacttgtctctgcttccagacctgtgtgcctgagcatggtgtcactgttgactaaataaatcatacactttactttctccatctcactgatcacaatcccagtgtccagacactgttcttgaggctaccatattggatagtacaggcaagcaatttctcatcatcatgctcagatctgatagacatgcttggggcccagcttcctagcctagaattgctagcatatacccccaactcagttgccacttttctggtagggcatagattttagagaccctgtatctcttcctgcacccaccctcagttgagatcataataagcccagaataaatctaggggtctgagcagcaggaattgagtctgtcacctccactcaggctcttcctgcacctttgctcgctggtcttgggtttccaggccacacttggggtggctttgttttataagcattgaggccccatcctgccagtaggagcactgaaagctctcattaagagctgttgtatttaaattagagataatctcaaacacaatgctggaagagggtgctgggagggccaagagagaaagctgcaatctcttctacctttgtcactctctcccagcccttattgctaagcagccctggcttttacttcagccaaagggtataatttgcatcacatgtagggatttaaaataccccttcacatccccatcaacaaggtctgtcacagtgctttgctttgtttcttcccaagttcccatagctgcagcctgggttggaggaggggaaagaggttgtgcttacagaaacagaccccactgttggctaaactcttaaacactgctctccacctaaaagcttagagagcatatgaatcacgggcctaaacattcttatttccctagtgttttactgtggggtaggtgctatctttcacattttaaatatatcaaccgattcacctctaacaattgaaagtgtgaattaattatgactgtgacttacccaaagttatatagccaataaataatatagactggatttgaacatgtggcaatcgatgtttggagaggtgggtacctggcatatactacagagtacttgagttgcagaaaccacagaggaacaggcagattctcttcatcatcagaagacctgagggagtaaggaactcatcctttacagcctgtgggacaagcatttgtctgcaaaccacatcaggtgtcaccaacagtttgtggaaccacacacagagcagcaaaatcttggggaatgacctcccaagcaatttcccattaagtataggaaagagctcattcctggccagtcacttctaattattgctggagttcggttgggttgctagggtccagtcttagccctatgctttcttacacacacatgacaagcctaagtgtaccacctgtgtaactggtccctctgccttctccaggactgagtctgtggccgagaagatgctgactaactggtttgcttttcttctacacaagttcctgaaggtaagacagagtgaccagggctagagtgaaccacataccctggctttggaaacagcatggggacctgttcttcaaaaactgggatttgttggcatggctgctcccaagcaaaacagtcctgggctctctcccctggctttagaggcagtcaagaagagccaggcaagatccatattctctgacctgatatgcccacaggagtgtgctggggaaccactcttcatgctatactgtgcaatcaagcagcagatggaaaaaggccccattgacgctattactggtgaggcccgatactccctgagtgaagacaagctcatccggcagcagatcgagtataagactctggtgaggagaccaagagccctgtaccacctgtgactgtcccttctctaccttctagccaatgaagccatttatcaaaaagaggcttagggaccaatctgggcatatcaagtatataaagagggatttcccaccccccccccttccccatgagccaaaagagctgcttgtgcctcaagatgacattgagagagaataagttcactcatcattagggactgcaaaatcagcaaggaaagaaagttaagtgtgttggtctccagtgtagaagctttgagggcaagtaaggccagcacttgacacccatggatctatcttgagcctttcaagtacctcacactaagcttaccttcccctggcccatctaagaagtagattacctttttttgagaaaggattaacaacttggcttcagctcctacaatagatgacaggaagaagaggaagaaaccatgtctcagaatagagaaccacattcttctctttaggagagcaaactgtagaaaatggttctgagacctcagcttcttcccacgctacttccccagtatgtccatctcacccttgatcccctacttacagatcctgaactgtgtcaaccctgacaatgagaacagcccagagatcccagtgaaagtactaaactgtgacaccatcactcaagtcaaggagaagatcctcgatgccgtatataagaatgtcccctactcccagcggccaagggctgtggacatggatctgggtaggaagactggcactggactaggagggcaagaggggagcatggcttccaagacagctatcaggccatgagatagctagggaaaagggatgtgaagttctgcctggtacacagtccccataaaagcatgactagatcctggtcagatgaaggcaatgggaaacattctccccacctccccccataggctttgtcccctcagatatgaggctcttccacatttgtctttctccctcccccaacccttgccctttggatgtctaaaagctctgccactgacatcagccaatgaagaccaagttcctaagtctctagaggacgcacagactgggtggacctatctgctcttaccccctcacagctacccatcctttccacccagagtggcgccaaggccggattgccagagtggtgttgcaggacgaagacattaccaccaaaatagagggtgactggaagcggcttaacacactgatgcattaccaggtaagagagcatccaccccatcctgctttcatcctgtgggaaccactcacagtttaggggtctctgtaagattaagcacaggtagacaaattcagaacaagcactaaaataggaactggaaatgagaaacactgaggaaaattaagccagccagaagaagtgcctcctcagtctgtaagacccatggaactgtgtgaagaactgtggccttcatccttaagaatgtcctcttttctctgttagaaagcctcaaaagccaacatactttcctctctctccactttcttcttccgtaggtctgaaagagtgatgtttagctttgactgcccaatagattaattgggggaaacataaaacatggactctaagactgccttagcaatcctctcctgtgtatctctacagctacacaaggaacaacatattgcaaaatcttatacctggacagctccagaaaggtgccttgtgctcatttttctggcttcttactaatgccacttgctctctgacttgtaacagaataggtacagccttgtcttcagcccttaaaatccacagtaactagaaaaagttaagagcccttactttttacttgcatggagtggctcagcaggtatgtagatcaaattcgtcatagaaggtgacaaggaatatgcatgtaatactagcagacaccatggaatgaacaggcatacaaatctcagcaaaagaatataagcatccaccccaccctactttcatcccgtgggaatcactcacagtttaggggtctctgtaaggttaagcacaggtagacagattgggattcaggagaagcactaaaataggacctggaaatgagagacactgaggaaaattaagccaaccagaggaagtgcctcaggctgtaagacccatgggactgtgattaatgatatcctcctatgtggctgatttataaagagagacatgcagagaggctgacagactagactgagttaccaataaccagccactgggagaccctgaagctggccaagtgccttgaaacacagaagaaactgggagtactaggggtacccccaaagcactcctccctgtgcatccccatgttacacctggatcttagtctcagatgtatagacacatgctttctcttccaacacccactctgctggtgggattctataatttcttccaaccttaacgtatttatctgtgtgctgggggtaacacctataacggggaaggcattaagtagctgaaggatttagaaacatgtgtacaaactcaagatttgtacctacagacaagcagaagaaatcaaatcattatgtgttaatttcatgtaaacacacacacacacacacacaccttcacatggtgagtacatccaggcaatgaaatgaaccaattagaggtgaatgagaaagcccgaaagataccaaatctgtgccaccaaatcttgttcctgaagggcaggaactttacttctatccatctttgataccttaaggcttatttctgttacccaacctgtgtattccaataagaatagactaccgctttcttattgtggctctcttacaaaacacttccaattccctcgtgtcattaatcatttatatattcattcatttgtcaaatatttactgagctttactgagtgcaaggcacttcccactccctagttctgagtgacagaggcagcaggaagtcttccttcctttgagagatgatgacgatggtattattattcaaaatggcaacatgagtactaacacatgctgagtgctcacagggtactaggtactttactcagactttatgtgtcttaatttctttaataatcacaacaataattaccagacacaattattatccccagtgacaaatgagacaaccaaggcccagagaggctggtacgtggtgatagagttaaggtcagatccaggcagctattttaagcatgggtttataccacctataaaaaaaaagagggagaaaaaaaccagggttggggtacgatggggagagagagagagagaaagagagagagagagagagagagagagagagaataagagacagagacaaacacactaagagaggtagctttgtaactgctaagaatttgtcacattagttatcttgtgaatttccttaaagatgacaaccatacataatgtcattgttgttgttgggaggataaactccaccctcacaaggttttcagagtagcatttctaggttgtggatggcaagaattcttgagagatagggctaatgcccccccctcaatcatagactaagggctgttggtacacatagcttggcaaatccagagattctccagcagaacactggtacttccttgaaacaatgatgtctgcatggggctcagaactcaagagttttacctactctgccctcttgctatcttccctggagtcaaaggctgttggagcccctgcagaagaaaatcatcttaattaacaaagaaatgggtaaaaaaattgcctgggctcctatagatttatagggagggtaaaattaaacaccatcactaaagctggctatcagggaatctcgttagcactaatgttcatttatagtttgacttctcaacatttaattcttttttggtgggagagaagaactgacaatttaagacccagaaagatggttttatggctggagaagctataaatcaaacttacaaagttcataaaaattgttaaaataaaaaatggtttaataggaatgttttatggcccataacattattatagctgttttattccctctgcgttaggggtttaattggatcaccacaattctggggattctccgtttttattagatggagggcaatcttaaatcaagatggccccaaatgtcttctctatggctccttattcattggccctcccttaactgtcgggtgctaggcctggcatcttctcagaggacagggcactgtgccatctttctcctaactccccaagggcagatgcacttttggtgaaacgattcaaggtggccaactcataatacaacaaaggccaggagagaattggagccaaaggaaaagatgaggctcacaccaatgtgatttgtaataaaatcccaaataaagaaatagaatgaagagaatgtgtgctctggagatgaccggtctgaagaaaaatatcaactctttagtacaataatgatgaggccctgaagcagtaacttaacctactcctgcttctattctttcatctgtaagatggaaatagtcatccataacacaagattgatgggaggctgagtttaacacttctgcccaatagaaataaagtgtgtcattctaaatttttcactagtcccattaaaaatacagaaacaggctcttgaaataatgttaacaatatactttatttagctcatcttaaaagaattagtttaagtgcaaaatcaatgtcagatttattaatgacatcatttatattcttccattcatactaactttctgaaatcctctctctctctctctctctctctctctctctctcagtgtgtgtgtgtgtgtgtgtgtgtgtgtgtgtgtgtgtggtgtgtgtgtaaacttgtatgcttatttgagattggctgcatgtcaggtgatccagagatatgaaaggcaataatggttagttgtaatatttctgaacttccccatactccctagaagtacttaacttctcaagacacctcagttctcccatgtcgtctttttgtgccctccttaggtgtcagacagatccgtggtggctctggttcctaagcagacctcctcctacaacatccctgcctctgccagcatctctcggacatccattagcagatatggtaagaagccaaaatgcaattaagaagctcaaggtctaggcttctgtgatcctcagggactacctcagggaccatccttagggaagaccctgctgctgccatacaaaggtaatggcttatctgtccccttcctgaggagtcttaagagccatttgtctcctttgaaaagaggcattaggtaaaagagtgagtgtagcaggtgtgtaccctgatttgaggttctcctatcccactttatagctgtgctcctgcttgaattggtaattatagacttttttgttaagagtgtcttagtttgggacacaaaattgatcagtccttcacttccattcccagcctcctctgagtagcaagcttcagtctcactttgtcagttttggttccatgttcactcaaaggcacacactaaactatccaccttgtgatggtttgtatatccttgggccagggagtggcaccatctgaaggcgtggccttgttggaataggtgtgacctggttggaatgggtgtgtcactgtgggtgtgggtataagatcctcaccctagttgcctggaagtcagtcttccactagcaacctttggattaagacatagaactctcagctcctcctgtgccatgcctgcctggatactgccatgctcccaccttgatgataatggactgaacctctgaacctgtaagccagccccaattaaatgttgttttttataagacttgccttggtcatggtgtctgttcacagcagtaaaaccctaagacacacctgaaagaacctataggacttaaggcagtagttccaaaaggagctcagaaaatatattctaggacctcaaattaagtgccaactaactctaaagagaatcattacaacttgaaccattactgtttagacatttttttcccctaagacatgagttatatgtgtagctgtggctgtcctagaacaagctctgtagaccaggctggcctctaactcacagaaatctgcctgcactgtctcctaggtgctaggattaaaggcaagagccaccactgcctgacactatctagactttagggattttaaaatttctaaatcttttttctagaaattttaatttcctctttccaaccaaggatccataaactattcaccaaatatgtagtcccaagagtcctttcaaggtaaagcaggtttattctgaattgatacagcaggcaggtggcattgctgaaggaaggatgcttcaagcaggaggttggcccatctcactctggttttccctaccctcttccagactcttccttcaggtacacaggcagcccagacagcctccggtcccgggtccccatgatcaccccagacttggagagcggtgtcaaggtttggcatctggtgaagaatcatgaccatggtgaccagaaggagggtgaccggggcagcaaaatggtgtctgagatctacttgacccggcttctagccaccaaggtaattcttgcacagcccaggccaagctgttccctaaattttggcacaaacacccatgctacaggtgcttctgattgcctctactatctctgccttgtatacttgctttctagttaagtgggagaagaagaaaaaaaagacccaggtgtaccagcaatttaagaaaagaccctcctgacccactgtgccttaggcagtgagacgataaaggcagcatcatttagctttcccaggagagaacaaaataagccttcagggatgttataacttagagaggaggctggatcccaaagtctttccccactgatcccactgcaatgctaaggaactctaatgtagtggcttaaagccctcagactttctcccagaatggtccataagtagtctatcagactcatatcttcatctttgctttgttaaatatgtctagcatatcaataagagaccaccaaaaaacatctgagaaagtcaggagttctagtccccaaagtctgtcttgagcctgttaactgggacccaggtctaggcttgtcgctgtagctagaacccatgaagtctgtggatcatggctgtacatgggttctcctgaagataaacttgaagcctatgctgctaacaccataaagctgttgatgcttcatttcagaccccaccctaccccccaagctccaccaggggtcagactccctgagcaccctctatagactctgctgccagtttgagtcctctcatttattttaggacattcatttcctatcttcccatcaaatgtcctgagctcataccttcagggcacactgccacagattagaagagagatctttctatggatttccagacatgtcagtctctcccaactccacatcccacccagtatctacctcactcctgcctctctacctatacactcttgcatttcagacaaatttccaaggtaagatgggtccaaggccccatctggcatgccttctgctgccctctggcacccactaactatttcattgtccccctccccactttctcccacagggcaccctgcagaaatttgtggacgacttgtttgagaccttgttcagcactgtgcaccggggtagtgctctccccctagccatcaagtacatgtttgatttcctggatgagcaggcagacagacacagtatccacgacacagatgtgcggcacacctggaaaagcaactggtaaccctgggggagctcaatgggaatgccacctgaggaggtccagcattttgggggttggagaccagcagaagctagagatgagaagtagagatgggggctaggttatctggctcctggaacacatcacgcacacatacacactacacacacacacacagacactgcagagtcaacatcatccccaaggctgcctgctacaagtgggccttgcctagcctgagctatgcatatcattttgagttctgcctcaccattgtgacccttcctttggtaaaactgttccctatgatgtagaatcttctagttatcaagaggaagaaactaaggaacataaacaaagctgtatataaaacctacatgcaatagatgactgtgagcatccacttagctttgcagtctatcactgttaaaccttctgagagatgtgcttctgagctgggacccttggtaaagatggccagctctggggatgaagctggtacttgctagacttgacaaacccacaagtatgagattgcattgcagacttgctctcttaaagccaagttttaaccccagcatcatagctttcaggaagcaacagaaagaatgatttttgttcaggtctcttctacatccagaatagtggtgggagaagcagcttctgatagtgcctaggatgaagcttttccctcccaggttttaagactggactacagaccatgctaaggaccagcttatagaccagacaagacagccaagagccagagtcaaaaggctttctctaggactgagcacaaaggagagaaacatttggattgggcaggaagcccacacagctgtctggagtcagcaatccccagaaaacagagctgacacagatgggttcaggctgtcatttggaaatcaaaagtcctagcaaccagcaaaatactttgagagagccaatggggccttggaatagactttcattcttttgatgttgtgggcctcctcatctgcaatttttggtcacagtggagtgatatggttcagtggcagtagatgaagaatactcagtaagcccctaccaaaacagatccatggtgtctcctcagctttgcaggatgttgagcccagtactgggactagctgtttggttaaaatcaggagaaagttaaaggttgtttgcttctctgtgccttctggctagactcaagcaacagcaatgcaccccctccccactgtgatagtgtgataaagtcatgtggcttacacttcacataacaaatgtccaaggaaaagagcttagacatgtccagccagctctgtcagagaaggacaagacagaagagctgtgccaaagctggctgaggcagctcctcctaggtttcaaggaagggttgcaagttggagggcaagcaaaatttacaacaggagacttgggaggggataaacactgacatttacaatacctatcattaaaaacacacttggaaaattccaagttggtgaagtcagcagaattcaaagaaagaatagcaagagctaagggcactatcttgggctaggagggcaagcccgtgacagggttcatgccacacaggtattagaagagtcaaggctggagggcagccagagaaggcagacttcagaaagaggcaaaacagtagctacagaaactgttttgaaggcaagcaatgggcttaatccctcctggaattgggaacattgaaggctattcctctgcctttagattccagagtctcagaagcagtctatctttagggaaaaactcagagccacagtgggctattctctcttggaataccagcaacaggtccctcacttccctctgccatgctgagacacaaaaagccctggaggagacccctgaaagaaattactccatgaggaacctgtcctctgactcagtactgagaactgtctcaatggcagactggctccagagggtagtgtccccactgaggcagtacttaggactgactgaccatttcatccttttatacaatggctgtgacctctgtgagagactctaagagcctgatgggtttgtctgaaaccttgaggacattgtgctgttttctgtagttgaccttccccttgggcactgaggcctctggaaaagcctatcaagaaggggcaaagcccagacacacccaaccctcagctgttagggagcagagcaaataaatgccttggtataagaagatcaaaaccactctgctttctcctgcatctgggaacatcataagatgagcaactagctcctgttggaccagtttctgaattcattctcttctcttttagaatggaatatctgctctaccattcagcagtaaggggaaagtattgggaaggggcaatgtcaaagtgcattcttcagggtactctgccttttcctacagccttccacttcgtttctgggtgaatgtcatcaagaaccctcaatttgtatttgacatccacaagggcagcatcacagatgcctgcctctctgtggtagcccagacctttatggactcctgttccacatcagagcaccgactaggcaaggactcaccttccaacaagctgctctatgccaaggatatccccagttataagaactgggtagaaaggtcagtaattccctcaagacacccactgtgagcatcagtggccactgaagagcaggacctcatacctcctatgttgtgggaaggaaggggatttggtgaggtctgataattatcatcctaattaacatttattggacatgtaagcattattgtgataaggattttatatgtattatttcactgaaatattcaaatggacagttgtaaaatagctgctatgattatccctattttactagtgaatgaatggaggcacagaaaagctaggtaacttgccaaagctcacaagctatgaggtaaaagagctgaaatatgaacacaaggagtgttgcctgagtctggggttttgactactcaggacccagcataggactcagtcttagctgactggagtgtccttcagaaatttggactgcaccttagactcacacctcagcttgaagcagaggccacatcagagaagagatggaaggcaggaatagtttggacccatggctttattctcccaaggtacctggaccagggtgggtattggtgaatgtttgctgaactcccatcataggcttgtcctgtccatggcagatactatgcagatattgccaagctcccagccattagtgaccaagatatgaatgcctacctcgcggagcagtcccgcctgcatgctacagagttcaatatgctgagcgccctcaacgagatctactcatatgtcagcaagtacagtgaggaggtaagacagggtctcaagggctgagaccaacctgcaacttgatctaggcccgaaaaaacagaagtagcgatcacttttaaaaaatcgcaatctatagtcaaagtcatgagccccaaattatcttttctttataaaacagcccaacctctcctgattcattgaactcctccctgtcttctcttactcaagtattgtatgattaattttattctttcttaagcaatgaatagaattatcagtttacacttgggcagatccagtcagattgagatagactgatggactttgatgtgaacaaaagttaaccaggaaggtgacaggccatgcattagcactgagcctaaagaaagaaacagcaacaacaacaaaaaatagtattccacacttaagtaactctaacatatgctttaagcatatgagagctctatgcacatgcatatattcctgcgcgtgtttttagatgtgtgctctacatcatgattttgtggcatgccacccttatggcagtggtcccaccagagtaaatgcagctgaaaaattcctgtgtgaccccagagtcatctgtacctcatagtactcatgattatatggccatgctgggtaaataagcccaccaagctgctagttatatggcttacaagactaagtacagtctgtgctattaatagtaaataactatgtaactagtgcataaactatgtttactatgctatgttatgctttcgttagtattttagagcatgctcctacttataaaaacagagccatacgtttcatatgtgttctcttgtacttgattcagtctcttgcatgtgggtactctcaggtgttttcctgatgacaaaaccatgtaaggactctttcctctgaaagcatccttactgttaagtaaagcataactatgcataaatctattcactgaatcatgccagttatttgacattacattcctaaaggcagattgaaaaggtagagggacagatgctggtttgatgactccagaaagttgagcctttgaagctgaatcttgagttacctgcctttgttttgcccttcagctcatcggggcactagagcaggatgaacaggcccgacggcaacgactggcctacaaggtggagcatctcatcaacgccatgtccatagagagctgaaaggaagacatcttgttcttggaagagagactcatataagctatcacactggcttctcaaaaggaaagatgggatgagtgaagggtatcagaccccagagctggctatcctctgaaacctcactgacggaagaaggaaaggctcctctgtcaatggcagccatgtttcatcacagccggttccttccagaaggacagtgaacaccacccatcacagtgtgagctcaggacacaacgggcaaggagaaggtggccctttaagctgagaggcttgagccagatggttctgcctctgtgactgctgctttgcatgaaaattcatttgatgtatattgggaaataatgagaactttatttaattttttaagaaaaagggaaaaaaacagaaataaaacagaaacataaatcctccctgtccatcccgtccaacttttgtttaatttgatttctattcccttcttagtaatatttctccttccttctgtaacatctctttctcaatgtcagaaaaatacctgagagatgctgagtagaaccagtatggaaatgctctcctctcccttgaactgagaggaaggaggagaggcaggaaggagcagaagttcgtactaaccatttggcaaataagccaggaagacctgaatcccaccacagccagatgcaactgagaacttcaggcctttgtggaaattgcagaagctgatcagatccacctgctaataggaaactgccttctgtgctgtgcccttgtgtatcctcatctcctaagaggaggaagtacccaacaaggacctgtgagaacaccttttctttgtttcacttaatcccaagcctcaacaaatgagaagttggtccttggtacttttccttttggtttccctagaattgatatcagaaactgaagagatgaggctttcatagaacagccacctcctccttaaggactctgaaaagagacccacaagccaggcacctggggactgcacagaccaggcctcctaggtctgagctgaatggggaacatgggtgtttgactttggattctactcaaccatccactagtttacggcaattaaaaagaaaacaaacactgtttacagtaagcaatacttgaagagtgtaggtttaaaaagcagcagtatttattattatattttcttttctcttgtgcctggagaggggaggccaaccttcactcataaccagaagcccctgaccaactgggcatctgcgtttgcctcagtagaaatgaccatcatctctgtctgtcatgaaaccatggatgtgaaagtgtattacttctgagaaggcacctgttcgtccctctgtctcctgatacctaatgccatagatggccagccttcctgagtatagcttccaagcagaggccaaggctccatccttgggcccagaggcaagctctgttgtagcaggacaagaaattcaactggtaagccctcagggaatttagtcctcctgccttgggatgacccctagcagccaactccaacagctttgcaattagcatctgtttctagggaggaggacaagaggatgacaaagggtgggcatgagggaatggtgaacatatgtcccctaagaaggcataaatctgttttttaaggggtcaggaatgccagactggaaaatggggctgggaaatggagctaactatcccaacagagactggccctgggttacttccttcacaattaactcaggcctcagctgatttttccagttgattccagtatctgagattctgctcaccagatctgactgcctgcacagggcaaagaagaaaagccaagaaggcggcttccatggaatgtatatatcttcagatagctgtctcacatatagctgaagctgtctgggctgttcagcttgtttcttgcctgaatgcaactgacaagtggagagagaaaagcattcagcaaaatactcaggaaacttgctgattttatgatgattcacaaccagccatgccaaggccacttttcttctgataatctactcatgttaaagttttcggggccatattaatatcctggaaaaaaaaaaaaactaatgactggcctttcacaccaagccaaagtgtttgctcctcatatcacccaaagcttatcatcttagaacttagaattttgaaaatgaaagaaatgatatagtcaaaacaagaataggaacagaagacaggataactctggctcgcctttttttccatctcagcaccgttaaagactttctgagcagctgctactgctcaggctgatgtcgagagtgctgttcatcaagaagta

SEQ ID NO: 16 - DNA, 8590 bp, Mus Musculus
atccttcagctgaagacgagcgatcagatctggtggacccgtgagccgtggagccgcggggagcttatgggcccggtcgcagacagagctggcagcggttcctggaggaaatagggccgagcaagccaggagcagaagggaaggaagcgcgggatcgctgatgtcagagcagcccggaaagtcgtgctggagaaaactgaagacacccggctttgagccgccccggagggaccctgcgggaccccacgccccttcacaaccgggtccctgcgcacaagcgactgggacgaagacgcgaggaaccattcgggggccaccccaggaatacaggcaagcggccggcgcgggccgaggattttaatgatcctgggttacatgtggaactggctgccagtgtgactcccgtcaggcaggactgggcgcacgctgccctgggcaaccgccagttgagcggacgaagaggggacgcagggacagacagacactgccgagctggaaccatgtgagagctgatcttgaaaagtggacaaatacatagaggagctgtcccccagcctcacccctctagggatggagcagaggaggttctatctgcgggccatgcaggctgacaacctgtctgtggttctgctctcagtggcctggctcctgctagctcgtgggaccacaggtatgcctcagtacagcactttccactctgagaatcgtgactggactttcaaccatttgactgtacaccgaagaacaggggctgtgtatgtgggggctatcaatcgtgtctacaagttgactggcaacctcaccatccaggtggctcacaagacagggccagaagaggacaacaaggcttgctacccacccctcattgtacagccctgcagtgaagtgcttacactcaccaacaatgtcaacaaactactgatcattgactactctgagaatcgcctgctggcctgcggaagcctctaccagggtgtttgcaagctcctgcgactagatgacctcttcatcctggtggagccatcccacaagaaggaacactacttgtccagtgtcaataagacaggcaccatgtatggtgtgattgtgcgctctgagggggaagatggcaagctttttatcggcactgctgtggatggcaagcaggattacttccctactctgtccagccgcaagctgccccgtgaccctgagtcttcagcaatgctggactatgagctccacagtgattttgtctcctccctcatcaagattccctctgacaccctagccctggtctctcacttcgacatcttctacatctatggctttgccagtggggggtttgtctactttctcactgtccagccagagacccctgacggcatggccatcaattcagctggagacctcttctatacctcaagaattgtgcgtctctgcaaggatgaccccaagttccactcctatgtgtccctgccttttggctgcacacgtgctggggtggaatatcgccttctgcaggcagcttaccttgcaaagccaggggaagctctagctcaggccttcaacatcagcagcgacgaagatgtcctgtttgccatcttctccaaggggcagaagcagtaccaccacccccctgatgactctgccctctgtgccttccccatccgggccatcaacttgcaaatcaaggagcggttgcagtcctgctaccatggagagggcaacttggagctcaactggctgctgggaaaggatgtgcagtgcaccaaggcgcctgtcccaatcgatgataacttctgcggcctggacatcaaccagcctctgggaggctccactcctgtggagggactgaccctgtataccaccagcagggaccgcctgacctctgtggcctcctatgtttacaatggctacagtgtggtttttgtggggactaagagtggcaagctgaagaagattcgagctgatggtcccccccatggtggggtccagtatgagatggtctctgtgttcaaagatgggagcccaatcctccgggacatggccttctccatcaatcagctatacctatatgtcatgtctgagagacaggtcaccagggtccctgttgaatcatgtgaacagtatacaacttgtggagagtgtctaagctcaggggatcctcactgtggctggtgtgccctgcacaacatgtgctcccgaagagacaaatgccaacgggcctgggaagcaaatcgatttgctgccagtatcagacagtgcatgagccttgaggtacaccccaacagcatctctgtgtcagatcacagccggctgctcagcctggttgtgaatgatgctcccaacctctctgaaggtattgcttgtgcctttgggaatctgactgaggtggagggacaggtatctgggagtcaagtcatctgcatctcacctggacccaaggatgtccctgtcatccctctggatcaagactggtttggcctagagctgcagctgagatccaaagagacaggaaagatctttgtcagcaccgaattcaagttctataactgcagtgcccaccaactgtgcctgtcctgtgttaacagcgccttccgctgccattggtgcaagtaccgtaacctctgcacacatgaccccactacctgttccttccaggaaggcaggatcaatgtttcagaggactgtccccagctcgtgcccacggaggagattctgatcccagttggggaagtaaaaccaatcacccttaaggcccgaaacctgccccagccccagtctggccagcgaggctacgagtgtgtgctcagcattcaaggggctgtccaccgggtccctgccctgcgtttcaacagttccagtgtgcagtgccaaaacagctcgagagccttaagagcttttatcctgtccccacagtaccagtatgatgggatggacatcagcaacctagcagtggactttgctgtagtatggaatggcaacttcattattgacaaccctcaggacctgaaagtacatctctacaagtgtgcagcccagcgggaaagctgtggtctctgcctcaaggctgaccacaagttcgagtgtggctggtgcagtggtgagcgcagatgtaccctccaccagcactgccccagcacttctagcccctggcttgactggtccagccacaatgtcaagtgttccaacccccaaatcacagagattttgacagtatcaggaccacctgaaggagggactcgtgtgaccatccatggcgtgaacctgggcttggacttctctgagattgctcaccatgtgcaggtggctggagtgccctgcacacctatcccaggggaatacatcatcgctgagcagatcgtctgtgagatgggccatgccgttataggtaccacatctgggcctgtgcgcctgtgcattggggaatgcaagccagagttcatgaccaagtcccaccagcagtatacttttgtgaatccttctgtgctgtcactcagcccgatccggggaccagagtcaggaggtaccatggtgaccatcacaggccattaccttggtgctgggagcagtgtggcagtgtacctgggcaatcagacctgtgaattctatgggaggtcaatgaatgagattgtatgtgtttcacccccatcatccaatggactaggaccagtccctgtctccgtgagtgtcgacagagcccgggtggatagcagtctgcagttcgagtatatagatgacccacgggtccaacgtattgagccagagtggagtatcactagtgggcacacacccctaaccatcacaggcttcaacttggatgtcattcaggagcccagggtccgagtcaaatttaatggcaaagaatctgtcaatgtatgcacagtggtaaacacaaccaccctcacctgtctggcaccctctctgaccagtgactaccgcccaggtctggacactgtggaacggccagatgagtttggatttctctttaacaatgttcaatccttactcatctataacgacaccaagttcatctactaccccaacccaacgtttgaactgctcagccccactggaatcttggatcagaagccaggctcacccatcatcctgaagggcaaaaatctctgtcctcctgcctctggaggggccaaactcaactacacagtaatgattggagagacaccttgtacagtcactgtgtctgagacacagctgctttgtgaacctcccaacctcacagggcagcacaaggtcatggttcacgtgggcgggatggtgttctcacctggctccgtgagcgtcatctccgacagcctgttgaccctgccagccatcatcagcatcgcagctggtggaagcctccttcttatcatcgtcatcattgtcctcatcgcttacaagcgcaagtctagggaaaatgacctcacactcaagcggctccaaatgcaaatggacaacctggagtccagggtggcactggagtgcaaggaagcttttgcggagcttcagacagacatcaatgagctaaccagtgacttggatcgatcaggaatcccttacctggactaccgtacctatgccatgagagtcctgttcccaggcattgaggaccaccctgttctgcgggaactggaggtacagggaaatggacagcagcacgtggagaaagccctgaaactcttcgcccagcttatcaacaacaaggtgttcttgctgaccttcatccgtacactggaactacagcgcagcttctccatgcgagaccgtgggaacgtggcctctctcatcatgacaggccttcagggtcgcctagaatatgccactgatgtcctcaagcagctgctctctgacctcattgacaagaacctggagaacaagaaccaccccaagctgcttctccgcaggactgagtctgtggccgagaagatgctgactaactggtttgcttttcttctacacaagttcctgaaggagtgtgctggggaaccactcttcatgctatactgtgcaatcaagcagcagatggaaaaaggccccattgacgctattactggtgaggcccgatactccctgagtgaagacaagctcatccggcagcagatcgagtataagactctgatcctgaactgtgtcaaccctgacaatgagaacagcccagagatcccagtgaaagtactaaactgtgacaccatcactcaagtcaaggagaagatcctcgatgccgtatataagaatgtcccctactcccagcggccaagggctgtggacatggatctggagtggcgccaaggccggattgccagagtggtgttgcaggacgaagacattaccaccaaaatagagggtgactggaagcggcttaacacactgatgcattaccaggtgtcagacagatccgtggtggctctggttcctaagcagacctcctcctacaacatccctgcctctgccagcatctctcggacatccattagcagatatgactcttccttcaggtacacaggcagcccagacagcctccggtcccgggtccccatgatcaccccagacttggagagcggtgtcaaggtttggcatctggtgaagaatcatgaccatggtgaccagaaggagggtgaccggggcagcaaaatggtgtctgagatctacttgacccggcttctagccaccaagggcaccctgcagaaatttgtggacgacttgtttgagaccttgttcagcactgtgcaccggggtagtgctctccccctagccatcaagtacatgtttgatttcctggatgagcaggcagacagacacagtatccacgacacagatgtgcggcacacctggaaaagcaactgccttccacttcgtttctgggtgaatgtcatcaagaaccctcaatttgtatttgacatccacaagggcagcatcacagatgcctgcctctctgtggtagcccagacctttatggactcctgttccacatcagagcaccgactaggcaaggactcaccttccaacaagctgctctatgccaaggatatccccagttataagaactgggtagaaagatactatgcagatattgccaagctcccagccattagtgaccaagatatgaatgcctacctcgcggagcagtcccgcctgcatgctacagagttcaatatgctgagcgccctcaacgagatctactcatatgtcagcaagtacagtgaggagctcatcggggcactagagcaggatgaacaggcccgacggcaacgactggcctacaaggtggagcatctcatcaacgccatgtccatagagagctgaaaggaagacatcttgttcttggaagagagactcatataagctatcacactggcttctcaaaaggaaagatgggatgagtgaagggtatcagaccccagagctggctatcctctgaaacctcactgacggaagaaggaaaggctcctctgtcaatggcagccatgtttcatcacagccggttccttccagaaggacagtgaacaccacccatcacagtgtgagctcaggacacaacgggcaaggagaaggtggccctttaagctgagaggcttgagccagatggttctgcctctgtgactgctgctttgcatgaaaattcatttgatgtatattgggaaataatgagaactttatttaattttttaagaaaaagggaaaaaaacagaaataaaacagaaacataaatcctccctgtccatcccgtccaacttttgtttaatttgatttctattcccttcttagtaatatttctccttccttctgtaacatctctttctcaatgtcagaaaaatacctgagagatgctgagtagaaccagtatggaaatgctctcctctcccttgaactgagaggaaggaggagaggcaggaaggagcagaagttcgtactaaccatttggcaaataagccaggaagacctgaatcccaccacagccagatgcaactgagaacttcaggcctttgtggaaattgcagaagctgatcagatccacctgctaataggaaactgccttctgtgctgtgcccttgtgtatcctcatctcctaagaggaggaagtacccaacaaggacctgtgagaacaccttttctttgtttcacttaatcccaagcctcaacaaatgagaagttggtccttggtacttttccttttggtttccctagaattgatatcagaaactgaagagatgaggctttcatagaacagccacctcctccttaaggactctgaaaagagacccacaagccaggcacctggggactgcacagaccaggcctcctaggtctgagctgaatggggaacatgggtgtttgactttggattctactcaaccatccactagtttacggcaattaaaaagaaaacaaacactgtttacagtaagcaatacttgaagagtgtaggtttaaaaagcagcagtatttattattatattttcttttctcttgtgcctggagaggggaggccaaccttcactcataaccagaagcccctgaccaactgggcatctgcgtttgcctcagtagaaatgaccatcatctctgtctgtcatgaaaccatggatgtgaaagtgtattacttctgagaaggcacctgttcgtccctctgtctcctgatacctaatgccatagatggccagccttcctgagtatagcttccaagcagaggccaaggctccatccttgggcccagaggcaagctctgttgtagcaggacaagaaattcaactggtaagccctcagggaatttagtcctcctgccttgggatgacccctagcagccaactccaacagctttgcaattagcatctgtttctagggaggaggacaagaggatgacaaagggtgggcatgagggaatggtgaacatatgtcccctaagaaggcataaatctgttttttaaggggtcaggaatgccagactggaaaatggggctgggaaatggagctaactatcccaacagagactggccctgggttacttccttcacaattaactcaggcctcagctgatttttccagttgattccagtatctgagattctgctcaccagatctgactgcctgcacagggcaaagaagaaaagccaagaaggcggcttccatggaatgtatatatcttcagatagctgtctcacatatagctgaagctgtctgggctgttcagcttgtttcttgcctgaatgcaactgacaagtggagagagaaaagcattcagcaaaatactcaggaaacttgctgattttatgatgattcacaaccagccatgccaaggccacttttcttctgataatctactcatgttaaagttttcggggccatattaatatcctggaaaaaaaaaaaaactaatgactggcctttcacaccaagccaaagtgtttgctcctcatatcacccaaagcttatcatcttagaacttagaattttgaaaatgaaagaaatgatatagtcaaaacaagaataggaacagaagacaggataactctggctcgcctttttttccatctcagcaccgttaaagactttctgagcagctgctactgctcaggctgatgtcgagagtgctgttcatcaagaagta

SEQ ID NO: 17 - protein, 1922 aa, Mus Musculus
KVDKYIEELSPSLTPLGMEQRRFYLRAMQADNLSVVLLSVAWLLLARGTTGMPQYSTFHSENRDWTFNHLTVHRRTGAVYVGAINRVYKLTGNLTIQVAHKTGPEEDNKACYPPLIVQPCSEVLTLTNNVNKLLIIDYSENRLLACGSLYQGVCKLLRLDDLFILVEPSHKKEHYLSSVNKTGTMYGVIVRSEGEDGKLFIGTAVDGKQDYFPTLSSRKLPRDPESSAMLDYELHSDFVSSLIKIPSDTLALVSHFDIFYIYGFASGGFVYFLTVQPETPDGMAINSAGDLFYTSRIVRLCKDDPKFHSYVSLPFGCTRAGVEYRLLQAAYLAKPGEALAQAFNISSDEDVLFAIFSKGQKQYHHPPDDSALCAFPIRAINLQIKERLQSCYHGEGNLELNWLLGKDVQCTKAPVPIDDNFCGLDINQPLGGSTPVEGLTLYTTSRDRLTSVASYVYNGYSVVFVGTKSGKLKKIRADGPPHGGVQYEMVSVFKDGSPILRDMAFSINQLYLYVMSERQVTRVPVESCEQYTTCGECLSSGDPHCGWCALHNMCSRRDKCQRAWEANRFAASIRQCMSLEVHPNSISVSDHSRLLSLVVNDAPNLSEGIACAFGNLTEVEGQVSGSQVICISPGPKDVPVIPLDQDWFGLELQLRSKETGKIFVSTEFKFYNCSAHQLCLSCVNSAFRCHWCKYRNLCTHDPTTCSFQEGRINVSEDCPQLVPTEEILIPVGEVKPITLKARNLPQPQSGQRGYECVLSIQGAVHRVPALRFNSSSVQCQNSSRALRAFILSPQYQYDGMDISNLAVDFAVVWNGNFIIDNPQDLKVHLYKCAAQRESCGLCLKADHKFECGWCSGERRCTLHQHCPSTSSPWLDWSSHNVKCSNPQITEILTVSGPPEGGTRVTIHGVNLGLDFSEIAHHVQVAGVPCTPIPGEYIIAEQIVCEMGHAVIGTTSGPVRLCIGECKPEFMTKSHQQYTFVNPSVLSLSPIRGPESGGTMVTITGHYLGAGSSVAVYLGNQTCEFYGRSMNEIVCVSPPSSNGLGPVPVSVSVDRARVDSSLQFEYIDDPRVQRIEPEWSITSGHTPLTITGFNLDVIQEPRVRVKFNGKESVNVCTVVNTTTLTCLAPSLTSDYRPGLDTVERPDEFGFLFNNVQSLLIYNDTKFIYYPNPTFELLSPTGILDQKPGSPIILKGKNLCPPASGGAKLNYTVMIGETPCTVTVSETQLLCEPPNLTGQHKVMVHVGGMVFSPGSVSVISDSLLTLPAIISIAAGGSLLLIIVIIVLIAYKRKSRENDLTLKRLQMQMDNLESRVALECKEAFAELQTDINELTSDLDRSGIPYLDYRTYAMRVLFPGIEDHPVLRELEVQGNGQQHVEKALKLFAQLINNKVFLLTFIRTLELQRSFSMRDRGNVASLIMTGLQGRLEYATDVLKQLLSDLIDKNLENKNHPKLLLRRTESVAEKMLTNWFAFLLHKFLKECAGEPLFMLYCAIKQQMEKGPIDAITGEARYSLSEDKLIRQQIEYKTLILNCVNPDNENSPEIPVKVLNCDTITQVKEKILDAVYKNVPYSQRPRAVDMDLEWRQGRIARVVLQDEDITTKIEGDWKRLNTLMHYQVSDRSVVALVPKQTSSYNIPASASISRTSISRYDSSFRYTGSPDSLRSRVPMITPDLESGVKVWHLVKNHDHGDQKEGDRGSKMVSEIYLTRLLATKGTLQKFVDDLFETLFSTVHRGSALPLAIKYMFDFLDEQADRHSIHDTDVRHTWKSNCLPLRFWVNVIKNPQFVFDIHKGSITDACLSVVAQTFMDSCSTSEHRLGKDSPSNKLLYAKDIPSYKNWVERYYADIAKLPAISDQDMNAYLAEQSRLHATEFNMLSALNEIYSYVSKYSEELIGALEQDEQARRQRLAYKVEHLINAMSIES

SEQ ID NO: 18 - DNA, 222077 bp, Homo Sapiens
ccgccgccaccgcgggagccagagctgccgggaggagcggcatccgcgccagactggagcgggagggcggcggagggcagttgctgggaatttttcagccgagagggcgagcgatccggagagagaccccgagagcttgggagcggtagggcgtgcgagcgccgcagccagcggagcaaacctcgaaatagatctggaaagccaggctcccggaggaaatgggactgtgaacgaaccggagagcaagaagggaaggaagcgccgggattgctgatgtcagaggagcccggaaagtcgcgctggaaaaatctgaagacagccggggctctgcttcttcctcaggagagacaccgccggccgcccccacacgccccctcggcgcctccgggtgccccctgagagccggcgacagcgcccagccgggctgctgcggggcgacggaggactgaggggcgcgcggagcggagaccgaggagcgacttcaggaatacagataagtgtctggtggcttgacgtggattttaatgaatttggactccatgtggatttggtcgtctccctgattccgagctgcgggcagggagaggggcctcgcgccgccctcagcagccggcggcggccgaggtagaccgagcggggacggaaggacagaccgacgtcgccgagctgggtaagcggcggctgggccgggcgctcggagtcggcagcgccctccgccctctccccacaggcgcgcacacccgtggcggcttctcccgcgcccgcctctttggggtcccggccccagaagacccggcttggccgcggcgggcgagtccccgcgtgggctcggccactttcgcgggctggagcgcggcgtgcgcgcgatcgcaggctcactggagccgctgcctcccgccgagggcttcccggccggcagcccgccggcttcccgaatgcgggctgagggcggcagcagcgctccgcggcgcgcctccaccgcgcacctgccggcgctctgcggctttggggagctcggggcggcaaggctgtcctgagagctggagcccaaagagggcctcggtggcaccagcgagacagcccaaagccacactggccagcgatcgatttgggggcgttcactccagtgccggggtccctggtggccgccggctctcccttccgatcggggactggagatcaggggaatgggaaaacatcatttgcgcgggttccataaggctcagggagagattcctaggcactgaatgggtctaagtgtttcatctcccggggctccctttgcggtgtatcgcccagcaggggtccagccccttagtttgagcaccacaggagtgctgggggttgaaatgggagtttgcttagggtcccagaggctccttatgaaccatttgagaatgtttccttccatgtgctctttcttgccccaccccacaagtgaggtagggatcctagaaaattctagccctttttatccatcccacaggtagtctctataatgccaatcatggtctagatgcccagagagtcaccagaaactaccattttagatccccgaaaaaagtccaccggtttggaatgacccttgccctagtgggagctacctactcaaactcagctctgctcaggagggatagaaataatggtggggaggaagttggataaaagatttggggctctaggtcagtaagggtctagaaatgagagccccatgaagtgggcaatggaaatctgaacaggtcccctgtaggaatcttagagtgacagtggcacaccagtagaaagtgcacaagggacatgaaggcagcatcagtttgaggggactgggactgccagtcatagcttgaggcagtcacttgggggcccatcagtttggaagaacccacagaaatttgggggcacattcatttccttccattcacgcgcacagtggacaaggcttatgagcggcaggccaagatgagtatcttggctggcctgggctggaggctttgagagcaggagtcaggtttagctctcccctctccccacacaatagcagtctccctcctttgctgggcttctttcccagatcttgaaacttcactcttccctctgggttggctttggattctggggccttctactgattgacagagccccaggaagagataaccttggctggaggaattcagctattcctaactgaaatgcacaacttttatgcaataaccccagaaagctcccagagttgcttgcagccctctcccctctgacctccaggcaagaaaagagaagaattcattaacttccctctctcttcacggagcaccatttgaactaattacctgggatctctccttggtggtggcctggaggctgaaggggcagtgaagagaaagggtagggaaccaaggaaacagtggaatctgtcatagcgaggttgtttttcattccccttcttccacctggcatcaccaccaacccctcctcattccagaacttgcccctgctgccaccaaccagcattacctaaaggagctatttccctccactccgcagccgatcgtcttcagggacctgctgataaagggagggcaatgcagattaccctctctgctccctcactgtcctcagcaaattgcattaggatgggggcaaactggcttgcaaagcagttaaatggaaatgacatttggagcgatgtgcagggaagatgctgaggagcagcagtggtaaagtaccaggagatctctatccagggaccatgagtctgccaaggaaatcccagctggtccttctttttggcagggcataaggacaggggtccctcaaagcctggagcaggacaggggggctggctagcttttcagcccaagtctaaatgaagagtatggcagtgtcttatgtccatcgcccaaaaccatgtcattacaaggttggtggcccccctttcagagctagtctgaatacctatccctgtcttcagagcaccagggaacattcaccctgcaactctcttgaccatcaaaagctgcagatgcggtgaatgtaaaagttccttcaccatctgttttactgaagtctgcacttaaaatgaggttaaaaagaaagccctcaaagaacagctacctgtttcctaggtccctttcccatttaccaatacttctgcttactcagctaatctttatttcatgggcaggttacaagaaaacataggaacaggaggggaaaccagtgacatggttaaatatacaaggcagcagctgacagcagcctaaactcaccactttaggtgctatgaaatatttatggtgctggagttgtcactgtttgggggttttatagtttctatcctacctcattttctatgattgcctccctaagatatagggtttggtgtgggggaggcaattcctgtctccagcagcacctccccaccaccaccagctgtctccctgcattgccacacagctgtctccacacacacgaactgaggcacaatatacttctgtccatcatggcaaatggagaggcaaggagcgcctagccaagcccccaccccccacccccattctgatcataaagagactggagcattgtgttacagtctgttaactagaaataattcaggactgactgtccatagggaaactggtagaaacaggctttgaggtgctgggagttttacagctcgtgtgcgttcccccctcagccccaatcaccaccgccccacccaggggcagtctgttatcaattcattatatgtgaatattctatttctacccttcacatatgctcagttcaaacaatgatgaatggaaccagttccctgaacagttttttcacttcgttacaaagatttcatgcctgattagagtaaatgaggggtgggtgtgcatccacttctttttcggtcatttctaaaggtgagccctatggagacagagagaaaggcagttcttcccagggtcaaacagctggtctcaaggcacgagggagggatggctggtaagaagaggatatccccgtcctcctgggcttagccctcaggctctcctgggcctcattccctggcatttgggcatatggaacctctttatctagctccacactgctccatctggaattggagggcataaatagaggcgagaaagttctttgttggggagcagggtccttgcggggtaagagtgtaaggggagaggaggaaggaagggcacagagctgaaagaaatggctgaggcctgagcagtgcaaaagttctctgcttctacagttggttaaccattaaccgccttccctgctctggttctgtctctctcttgggtgaaagaatatctctgggaaactcagaggaccagcaggtgttcccccataccccccttcaccccagcttaacatttgctgtgtctccactgtcctgccacagccccaggctcagccactgacccccactcacctcttcctcaccttcttcccctaccccagcatactcttcccacgcactgccagttgtccctttacccaggcattgccagttgtttgcagggcagggcgtgtgtcagagactgggaagcaggcacagaggtggggagaatctattgaagggagcagccggcttcacacaggattcggagcaggagctctgagctcaggttatagacagctctataaccactaggattttcctagtgcttctcactgtggatctggcttgtgggtggctgttttggccgtttgaagtgagtccatgtggtccaaggcctgaccaaggcattcctaacaagtcagacctggaatcctgaacatcaaagaaaaccagcaggtggatggaagatgtagatcaagatgcaggagcaaaggcacacatggaaagacagaagtcaagatgtgggcacaggcacagataaatggagagagggaggaagacagcaagggaagataaagacagagagattaacagtgtgaatgggggtggacagagctcagagtgaacacaaagagaaaagtgggaaagagagccttgcaggcagaagggggttttctgaatcttcactggccagggaggctctgggctgaactgagaagccgaagtagcaggttatctccactagaggggactcttgaaagccaggcttggcccaaaacagtggcttttgtgcttttttttttttttagaagaaaaaaaatattaatagatgagatatattcgaaactcccagccgtcacttcccagagactacaactggtagggtcctattgccagtgggacctttgggcctctgtctgtttgcagaggatgagaaggcgcctgcagcattaagctgggatgcatgggttgtgagcaactccggagaggcctgccccaacaggtcacgtctagggctgggtggcagggagggagtgcattctcaacttaacagggagtccaatctgctggctggcccgccaaaaggcccttgccgttcttatcagcaacagaagtttctgacccaaccccgaggggccttcacatgcttcccatctcccaactccctaaatacagatttttgagactctcaggtagtagcaaaactgctcctgaggagacttttttttaaaagagctttcaggaactgaatgcatgtcaacattgtatcgctgatttaatctttttcttcatattctctgtgggaatctttctctgaattataattccccctttcatttcagcagaggacaatattgagagacagcagagtccagaggcttttcttatctaaggagataataactgcctaacaggggcatggaaaaatattgaagtattgggatgggcaggagaccagagagcttagccccgtctcttccaatctgatagcatcccttgatagttcatcttggtttgctttagctcagatgtacctggaggtcagggcagggggaagggaggatagagaaaagaaagaagaaaaacaagataaatgtatcgtgttatgaaagtttaattctgcttttctttggctaaaattactttgagggtgaaagataaaaggtagtagagttgcccttggaaagttcaacttgtctttcagagggaagaggaggagggatcccagggctccgagtgaagagctggtgaatgagcctgtctcctctgatccccgcaaaacacacatattctctccgacgctttgagaggacggaagcttctgacagaggaaccctagcacctcccagccctcttggaggagttgttctcccaggctttctcttgttctgtctaaacagcctccctctcaaccatagtatagagggatagaagaaggagagattcttaccctttgcactgaaccaaataggatgacactgaaagcgggaattggaattcatttaagtttaaataaatagggatcgatcacctgtgtggtgccaagaatgtggtagctccctcctaatacaaggatgaaaaagtaatagatcttaccttcagggcatttacagtacactcagggagtggaggaagaaattgcatagccaagtacccccaaatacctttagtaaaaggcagaatggcattaacagtgtgtactagggggtcagaggaagtgagagcagacagctcctcaaagcctttgctttaagtcatgggaggtgaagatttccaggagagactcagaggtgctggagaacttcacagtttcctgtgaagaaggatgactatttaatgctctcgcagtctccagcctctcacagctacccgtacctacccagttttcccctcgttcttctctgaggattttaaactggacagcgctggagttgttttctattagtcaatatcctacggcaaggactccagggtgcacactcccaaggattttcgtgttgtattctatgtaaattgcatccctttctggtacttctggagctggcgtgtagaggccagtgtggtgcctcaggaaatattattactcatccacattcacatttaagtgtccagaatcctgctattatgcatctactcttatctgaatgaagttattaaatggaaggacctgcgagggaagatttggattttatccctacaccttggctgtccactcctcgggctgcctctgccatgtgcttgctacctggagaaggagccaatctctttaaagctttctgtccataaagagggtagagggatactaatagagaaaggttaggaggatgaagatttcaactcaaagagaaggtagccattctgctttaagctttctgtccataaagagggtaagggatgctaatggagaaaggttagaaggacgaagatttcaactcaaaggctgtctctaatcctataaaggaaggtcatgctctccctgcacctcgtctgaggctgggggagccacatcagtgatgctgtcagggaactgacccctgcactgggaagcacagagctagggccatacttgggcttcaagaggcctgtgaaaccttggagattctatatcttcaagaatgatgtgggtatgtgtagtcttgtatttccgaagagaaggagttcttgccccctccacaatgtaaagaaccactagattccagtctctagagcctttcctagccgtcatttccgcttctgctctggtggtggaacagggctttggatgaggagctgtaaccccagtgcttctgagagtggtagacaactcactgagtgaacgagaacacgccagggacagctcagaatgtcagcggagcctatggattgtgattgctctgtgactatgggcaggtctttttacctttgagcaggggttagagggagcagccggccaggcagtgtgctccaccctttaagggagagagggtggaaggttcaggagcagaggaaggggtgtgtagaaaagccctgccttgccttatagaggcagcaggaccagcgggcagacagaagtggcaagaggggatgttgctgctttgaagtggtttcctgcttcataaaagtgaaaggcctcggctaggctgggtaaatattacgttggcctctgacctcccacctcccctgactgctccccggtttcccatttttttctcctgaggaacaaaaatacctgaaggagaagagccaattttttgaatttcactgagaacagcgttcttagcgggagcccagcccaagccagacaggaagacccaggctccttccccgtccacaggcaggaggcccctcgtgagtcagcaaagctctcgttccaggtctccactccatgttttagggcagtggtgttttccaggagcagggccggctgggatttcacagtgccctgacaacactgatgccccaccctgactccagctgcttaaaactttctaacaagtcccttcactctctgtgacattaaaacccaggctacgaggttttctgtaaggcaaacaccccaccccctgaggtttatctgtaaatgaacaaaatttgagtctaccgccccactctgagtgacccacagggggtcaagttcttcaagttcttcagctttcttggcccacagacttagagagaaagatctgaactgcatggggagctggaagcccctcccagcacaatcctgcaggaggtttaggccccactgagatggttgagagcagatggtcaggaagagcctggtgtcaaagaatcaaacaggaactaagtgcctgccttcacacttgtagcccttcccacttcctaaagatttctcacctgttgaccggtgctcaccctccgtttgttccctggtcccaggagggagataagaggttagttacgctctggcagaattggctcctgccccttacccagcacctcggtttctccatctgtataatggaatgaatactcaagcaccttcacttgtctttgtttctggagccaggcccgggaagagggtgttaggaaagttggaaaaacgacaagtgctggaaacaaggaaaactattctaaattttgggacaggtataagaagcgaaactagggttattttccccctctctctccaaatttgtttggaattttctgagaaaagtaagattttatttaaagaaaatctctatgctaaagaataaagggctgaagacttggtggagatgggacatagagaagaaagccaatagtggccctgcaaggagaccacattcagggcttgtggtcagcatttagccagtgggattggaatttgaattctgcctttgccgcccttgggtttttggtgccttcagagctctgagagtgtacatgaatgacactgtcgtaggattggtaggttggcattgctgtgggagtcaacccttcatggaataagaaaacgcagagctcatgggtatctggctgcctggctgcaacagggcttgcatctctcctgcacagagtagcttttacccaggcccacatagtggatgtgaaacccaagtccaaattgggtaagtgcattgccgtgagtcacacagcaagctgccattcactgccctccaattgctaggaggtttgtttgccccagcgtcacccgccacactctcttgatctgcccacttagctaccttttctttccagtctcttgtcccctgcactgtgcccagtgacctcccccatctctctcttccttggttttgagcagacaggcatctcacgagagctcctgggggcagggacatggatggagcagacacatcacagagtgtgttagcaggagtggagtccaggagcccaagctggacgctggggctcagggatcagatccttggtagcactgatcatcggtcaaaacctagcaggatgtctggggagaagcattagctgtcttctagtaggccaagaagctccccaagcaacacaaggagctttgtccctgttggaaatgcagagtgcgggatggggcctgtgagaggagagtcctaaacatcccatagcactgtccaagagcctgctgcagaaaatggggtcagcaagagcccttgattttcctttctaaatattattttttaagaaagagtttgaactgcagaataaataggtgtttggtgtagaatacttgggaaatgtttttgagtgtttaatagtaccttttacccgggcccacacagtggatgtgaaacccaagtccaaactgggtaagtgtattgccctgagtcacacagcaagctgccattcactgccctccaattgctaggatgtttgtttgccccagcctcactcaccacactctcttgatctgcccacttagctaccttttcttttcagtctcttgtcccctgcactgtgcccagtgacctcccccatctctctcttccttggtttagagcagacaggcatctcacgatgaagcagtattccctgtgagaactgacctctcctcttctcttcccatctgccggcccttagcacacaccacagcccttccatggtgctgcgcagtgtggtgtcaaaagacccccccttttaaatagctccaaccagctttcctccatccacagcaagccttgatatttgcacagtcaatggctctggcaaggccaagctgcccctccctccccgagaggcactgtgggcactgtttgtgtttcagtctctatagactcagcattcacagcttgaagaggctgagacaatgacccaagcagctgcctgcaaactgtgctggctgggaggcgcagagagctccagtctcacaaggctgcgagggaatgagaggcagggagggtcgccccagcttggatttgcacaccatgcacctgggagcattctcaggcagctgtggctgacctggaggaaatgaagagggctgggatccagagaacctggtctaggccacccgattgacttccactgcgggcccccagcttccttggccaaattttccaccaactgtgcagtccctgggggccaggaagaaaaagcagggccctggggaagcagccatgtctggcctggggatgggaagaggcaacatttgtctgcatagagaaaaatagaaagcttcacctgggagaagaaaaaaagatacgttccttgcaagaaattttaaagttggtgcagcataatttcatttgactgaacgagtgtttatagaatatccatataccgagtatgatagaggggagacaagtcattgtccaggctcttgaggaggtttcaacctggcaagagagggtatgcacgcaaatcatcgtcctacaagtcacaaataagtattgcaaaaagacagaaggagagagattagccagagctatcccagcctggaaaaggctacttagggagggaatgggctctacaacatttagggaattcaagcagaggctagaagatggccaggtctcaagaagagattcctgcatagagcagaaaggtatcgtagctgatagctgaggtctccacccaccctaaatcttctaagcttgagttccctctttgctgctaagtaaatccaaattcagtggaggaaaaggctgtgttatgaagtggagtgtcaggtccatacaattgaattccaaagtaagtaaagttggttctcacaccttcaggcccatggcagtctccaccgagcagggtgcgaggaaggctaggctgggattagccctggtctcctctggagccagaattctcctaatcatgttaaaattaacactccctctacaagcaggagcagacccctctgaactgagatttggtcaattctctgcttgcacagctctaacttcttctaatcattgtcataaacgggacggaagcagctgctcactccagtctattatcagcttggttggagacagagaaatttaaatgacagtaagatgcttagcaaagaaacgaaagtcagtgttaaaaataaagaaaacaagacagcttgtttcatcgaaatagaagggttattaaacaggcctgaattaatcagtgatctgccactgtcgggaattgaagagcagcagggccagggctgagagctgggaggagatgggtaaggagaggagtcaaggcagataggagccttctgcactcttgggctggctgcagggactgcagaggtgcttggtcttcagaggggttgctggcagctgcattctttcccacaataaagggccggctggggagagggagactggcacagtggtctctccttacagatttgtgcttttggatcctttccatctgccaccacctgtgcaagcccctggggccatgtccaggcctcagcccctccccagccctccttcccacccgccagaactgggcaagagccaaatggcattcagtggatggccagcagctcccagccccaggccttttcctctaaacattcacagggcccaagaattcaactctgagtcacagctccttagaccccatatccatttgcaaagagtagtaacaggatatccccaactatggtcagagtattgcttatgtgcaggcagagagtatcctcttgagtaagtgatctcttccaagatatatcagttggtggcatctgcaacgtcaggcagcagagaagccaagtgacatgtttaactccaggaccccccaagtccaagtcccactttcacatctggtgcctttgccaaaatattcaacctcaaatatacctaagtcctctcacctgtaaactggtgatgcgtatgctgctctcaacctcaccagcttgagtaaggggtacgttagcgggatgatgcatgtgaaatttttaggaaactataaaatcattgcacaaatacttgttcgtattacagtggggtcccttgcacactcagaaccaaacatcagaagaaaggtttttccgaagggcatggaatgcatctgggaggagagcagacagacgtgctcacaccttcgcaggcgtgtggaggggagggcgggtgaccaggcacatctgtgtgcacatgtgccttcatccggtgcggaacatgttggatcttgagtcaatcactccaggagcattttctttgctccttgacctccacattctttctcctcacccctccctcccgcttccctcctgggtccctcctggctgtttacccttttcccggcttctctctcacaccccattcatcatccagggccagattctcactcagggagcacttttcatctcctgccctaggtcctccctccccggcctgccattcccaccctgctccccatcagcacattcttccccctgtctcaacctctcagaaaactgcgcccgtcactctccctcacagtgggctgagggatccaagaggtccggggctgggctgatagcgcctcaagggtctcaaatgtctactaactgtgctccttcaccaagggactgatgccactccaggtgcttaagggtccttcaggccgagtgtctctacatcttggcacagaaaagacctttaagtggtcagacctctgcccagagttccagccacccctcagtttctgcatgcccctttaatccagctccatggcactccccttgcttggtgtgtgtaattgtgagcgtgcctgttacttaggagaggctgtctgacagctaaggatctctactgcaagagctgggagtctcagacaaagagagaaaaataatagaaactgcaggtaggaagatacagggtggggacatagcctgcttaagaagcttcctcctgaaaaggagttaaagcttttttattggaaggctggctgttggttcagaaaagcactagagagaaagaaaggcagggaaagacaaggaagggagaggaacttcagcctgtgtactgaggcggacctgtatgggaagggcccagagaatgcgaggccccagcctaaggagctggtatctcagcatcttctcctcctcctcaggaccggttttcctctttcctcctccacacccttctgtgctgccacaggtgcctggacaacccagcaagagcaacacaagtggtcctaaatcacccaagggccatgagaggagggtggcctgaaatcatgggaccactgatagaaatggtgggaatgacaactcaagacctcaggtcagcatgggaagaaggtgggactagcagcaccctgtttgtttcttccgagaggactgggtctggggaggcaggtgctgggtcaccaggttctgctgcacaatgatcaccaatctctcgagctaaaacagaaccctcggagtttgtcaccatcatacaaggcagccaaggagatgatgtccttgtacagtgtttctccaaaagcagaaacaagaataactggtgtttacttagagctctagagtttacaaaacaatttcacatccattatctcattgattctcaccacaaccctgtgaggtgtcattttacagctgaggaaagcgaggctccaaaaggttaaataacatgttcaaggtcaccagactcgtaagtgatagaatgagacttgagcccaggtccgtctccaaaggccaaggtcttttctctgcgccatccagcgctgcgagtttgacctccttgttgaagaccctgttctggaaccttccaaggggacttccctcaccccactctgttcatcactttatattgtgaatttgtcattttttattattatgtgctttttatgtgatccatgatattatatggttaacggctctggagctgtcttgcaaagacttttcctgcacaagtctagattatacattcttcaaagacagagctggtatcttcccattcttctccatctttcttcccacctcacccatctagcctcacccagtgggttcaaggcaaataatagccaggatccttcctaaatcatttacctccttcttcactacctcctgaagatcagtcatgacagatccctgagccaagtgtattagttcaaatcatttcttgaggccaactagtagggacagtgtccactgagaaaaagcaaatgagcacacctgggcaccccctcgcgctgctcttgacaattcaggctgaacacaatactgagtgaaagttatcatgctagccctgcacggataccaagaagcacgagatattgttcctgccttcaaagagcctctaattcagtggggagataggaaatagtcacataaaaaagacagctcaatgctgcaatgtagtgtgtgctagaatcagtgtgtgattctagcctctccacctccaatctcctttctctcctccaaagtcaattaaaaactagcagtttttagagagaaagagaggcagggaaagacaaggaaggaagaggaaatttagcctgtgtactgaggcagacctgtatgggaagggcccagagaatgcggggctgagcctaaggagctggtatctcagcatcttctcctcctcctcaggaccggttttcccctttcctcctctacgcccttctgtgctgccacaggtgcctggacaaaccagcaagagcaacacaagtggtcctaaatcacccgagggccatgagaggaaaccattaaaaccagcagtttttaattgactttggaggagagaaaggagattggagatggagaggccctagagggtttatgaggctttgaaggatgggctgggtatggataggcaaagaagggagtggaaacaagcattccagggcagggcgttttggggactcaacagaccaaccagtttgttgggagaggagtcactctgggagaggtgggcagtgaggttagagaaagacagaagagccagctgggaaaggacttgaacttgggtgcttagcagtgctgagtctatctgggcaacagcccagatagaaacacagaaggtgtttccataggtgaatttcacacttcagccatgtgcctggcaaagtcagacaatgggtctgagacacaaggaatgaggcagcacaaggcacaacttgcagatctgtggctggatcttggctgccaatgggtttcaccagggtccatctcagaggaaggcctggatggtgacaatgtcactgtcttacaagcattattttcagggaggcagcacgaggattcctggtgaagagccccgccctttgaacttttgggaaccctagcttctggaaatgagcagtgctaaaaagtgcacatcatctggcactaatggccactctccctgagatagagatgaagcatcagggattgggagtgatccttgtccctagagcacttcagtggccagccatgtgaggtcactggaggtaacaaggaaggtctgcaaaagaaagcaggaagttctctcacctgggtctcctgggagccattaacatttttcttcaagaagaaaaagatgtggacagcttcaaaggagagtaagtgggattttagggtcagttcatggaccgagagttgagatgaatgcctactgctttgttttggctttttcttactccctcattgttcctccttttttctcccagtagtataaattagagcagtgtcattatttttgaaaacattatgtttaatggcagcacaatatgccattatatggagtaactgtaatttatttaaccttttagttgagtactttttaagcttgctctcctgccccatctcaacctcgaagagtccctggctctcccttgtacagtgaagactggatgagagacatttccaggctctttgaaaatatcatttggaattgctctgaaaggcggctgccaagctagcaaagctcctgccacaaaacacccctggattccacctggtgcttgataaccaggactcctgtgtgccctaccccagcactgcctggttaccaaaataaaggatcagctcagggtagacataaatggaactgtggagcctcaagttttgacctttaacataaagtacttgccaagtcttactaaacattctggtgagttctcccagaccagtgataagaaggtttggctgaaaaataagtcttaaaaatctaggcagtgtagaatagtagggaaagcatgggcctcgagaatcttggcttcttagctgatgctcgtcacgttaggcttcctgagattccatttcttcatctgtgaaatggggatagtcatgctcaccttgcaagctaatcacacaactatggatagcatatacagggcatgtagcatagcgtgtcatgtagcaggtggttaataaataataataatagtagctactcttcatagttttttttccagaaaataagtgagagttgctagtaatttgctactcatggtcattagagtatgaggtctcctaacatgaatcttgacttggcttggcaaagccatatgcctacttttatttccttttcctgcctttggaaggagcctgagaattcctttttttgtcctttaatcccataatgtctaccagaacagcaactcaattgataagatggtttaaatagggtcctgttagaatcagggaagaggtgggatgacctttctcggactccgtttgcacagaaggctggagtgctcccacagcctgcttctcatagcatcagagccctgctaatttggagaaattctttctgacccagcggggaggtggccatggcaaagcagggctccttcctgaccctcccccaaagggggttgaagagggcagagcctaaggaagggggagcaggggatggggtggcagggaaggcagctgcttgaaattgattgttcttgtattttagtttataccatgcggctctctcagctctgcccgggtggcgacctttagataataaagggaattctgggagatttctgacaggcccatgacatatggggcaggtctgcagggtcaggcggtgtatctccctgctcccggccccagggtaatgaatcttgttttgactttgcaaagccagctcagccagtgccccagaaagaaacagagcccccgccagcccctcagatgagtgcacatcttggaacccttcataattcagggatacaactccaaacttttatagcctgtgagtggagaggacaaacactacatgttttgctaaggccctgggagagctggtgtggtttccagggctcgatcagagcctactgggagacctgggaaaaaaaaaacaacagaaatctctccctgacgttaaaagcagtcccaggacagggcttgtgcctggaggaggagccggggtgggagtgagagagatctctccttggggtctggcaagtggcagattcactcttctgggcaggagaagcaaaaaaagggtagggtccactctgcaggaacagcagaaatcagcacatcctaattcgcatcccaaagctatcatgggcagagcaagtgagttctctgggctactgttttctgggctaggtgaaggcagcaggagtcagagatacccgcctatctctgcaaattttcgtgtgcctgcacacccagacccctctcctttaaaagaacaattcctgaaccatgaagtttgagtgcctttctcctccctgttgtattagtttgccagggttgctgtaacaaagtatcacagaccaggtggcttaaataacagaaatttattttctccaagttcagaaactgggaagtcccagatgaggatgtgggcagagttgattccttctgatggctgtgagggaaggagctgttccagacctctcttctgagcttgtagatggtcagatgaggatgtggatgtctctttacatcacctggcctctgtgagtgtctgtctcaggctccacatttccccctttttataaggacaccagatcacaccgcattagagcctaccctagtgacctcatcttaacctgattacctctgtagagaccctgtctcagggacgggtgccatggctcacgcctgtaatcccagcattttgggaggccgaggctagaggatcacttgagcccaggagttcaagaccagcctggctagcatcatgaaacctcatctctacaaaaataaaaataaaaattagccaggtgtagacaggtgcctgtggccccacagatccctgtggttcctagggctgatgtgggaggatggtttgagtccaggagatggaggctgcaaggagctgagatcgcgccactgcactccagactgggagacagagcgagaccccgtctcaaaaaaaccaaaccaaaacaacagtaacaaaagacaccgtctcaaataagaacacattctgaggtacttagggttaggcttcaacacaggaatttccaggggacacaattcagcctttaactcaatccctcgctttcttgctagtatccagcccctgcacttgtgccccattaccctgcctctgttcaccactgcagagatggagggtccctcactgtcacgcacatatgtaagatctaagggccttgtccaaagctgagagccgcacgcagctcccctctcacagcccctgctgcctcaccgcctggagtatgggttctttccttattactgatcgagattttgagagcctccccaaatttccatctcttactccttggttattggagcgtggatgtagtttatcccacctgtgaaacgaatcgcatatatgaagataagcaggagatccaccttctcatagtaagagagggtgactgggtagaaattgtcacccaaatttgtcttgacacctcctggaggggccacagtgtcatctgtgtcaccttctcagagaaggctgccaagggtacatgcaggcagagacctattttcctcccctctctcctctcaccttccttcttcactctggggcaaggtatagccacttcgcttcacataaccgcacagagtctagggaaaaaatgacattcgattaatgaagcaaacgcagctggtacagaagtgacatctaaattgttcctttggtcccgctattttccataggaaattctttctctcctcacccccctcccccttttccctttaaatcgcgtgcataaaatatactaataacaatcttcggtgtctgtgcatgagtgacagctgaaataagaaaaagactaatcgtacctcctgcagccctgtcacatggagattaaatgagtctctctccccaccctctccctgctccccaccccctcacccccactctctcctctctcttggttctcaatgagaatcatgggcatttgaataataatattatagacgccatcagagtgacagtggggaaaaaatcagctcaaacccatgattattccttcactctaataattatttaaataccagataactcctttcactctaattgaggactttcagccgtcggcattacccggggcttttgcgttcgccctcttgctcaccttgtgctacccaacgtgcctggactacctctaaggtcggtgttagacagagcgatgctcagaatgcttgcacgtacagctgcacaagggatatgaagacaggtccttcagtagcattccacccacggggaaaagatggggcctcagactctcacatttagacaattttattctcacagaaatcttaaaccaaaaggagccttctgagatcattgggaccaatcccctgcctctaggtaaactgattcctaggcagcttccaggaaaattcaatatcagaaaatttcagaatctccttggcaggatgctctgcagatcctctctaggcagaatgtcccccttaatatctaactttaatcccttctgctgtagctctaactctttgggaagaaggagctttctgtgcatagactaaatctgacctgtccgtggggttgtggcagaggacaccatagcccccaagttacagcataggtgacggtcctgagtgtgacatttgcctgggcctgcctgggcctagaagaggacagaagcaatcattctccccaagggggaaaggagccattcggacatgtgtctttctttcattctgccccttaatccgcccctctttgaatctgccctgagcaccacctcgttgtccaggcccaatgccacactcacttctgcgtatcatggggctattatcaaaggcatccactttcccgaaaacaggacagcctgaaggcaaaacgtaactaactcccaggacccttccacctacaatggaggaagcgcctgcctttttgtcatgaggtctgggttctgactgcagcctgtttctgactcactttgagtcgccctggtcaatttgtttcctttctgtgggctgtggtgtctttcatattaaaaaaaaaaaaaaacagtgggttggaataatcttataatctccctcagcattcatctaaagttcctgctttaaaggcactactcattagaaggaagagctgaaggagaagacggactcctctccatcatgggaaaggaaggaggctaagtgacttccaggaacagctgctaacttccctgatttcacagccctcattttcatgctcatcttttccctaccaccgtctggctcctcagagtgtgtgagctccctagtaggtgcagtagtaatagtaggcaccctttgctgttattgttatgaaaactgtcagctccaggatggtgctggaggtgacgatgatgttgatgacagggttgttaggaatggagttagtggcaagtggagctacagatgggcccacgggtatgagagctactaacaggaactttgactcaatttggcaaaatcgtatttcaaatctaaattctctttccaccagctccttttgctataagggaaagccaagtggaaacgtagaggcatgtgcacccagatctcctgaaaagggcaataggagagggtagcagggaggagacaatcctctactgagctgaactggaaacgcctgattgtcatttcttccctgctttgccactgacgcccgcagcagctgatcaggaaggtatcagatgccttcactagctgtcactaacacctgcctcctgaatcctgatcggggagatggtgtcatcgggccctccacataaaatatttagtggcacttgcttcccaaagaggcaagcgtggcctctccttggcatcaggaacgctccgagttacatgtgctgggagactctcttgttcaggcgagagtcctggagcagcatacctggtttgagacttggagtaggagagagggaaactggtagaacagagactaggcaagttttggctcttgagaatgcatgtgacaagtgacttcatgcactaaacagagagggatgtgacagaaagaagaaagcatcattattaagagaaaactcctgaggttgacactagcagaaaattggggataggaggaagtcacactgggtatgcaaagtcaaatgcatgtttgtttaccagtgtctaccaaactgaggatgggaaattcattctaagacagatgatgggatggatggaggtgaggagctggaaataatgacaaataaattgctaataacaaaggctaatgtatcttaaacacttaagatggccatgaactgttctaagtgcttttatatgtattaactgatttcattgtaataatcctatgacgtagctactagtactaaacctattttatatagatagttagataacatcatagaatggctaagtaccttgaccaagtgtacacagctataggctccatttgcgtccaggcacctaagttcagagctcatgcatttaattgttatatcgcactgcctctcaccagaggcacaaaggtgggctccatcctcccttactcagaatgtggataggagtcctgatctttgcccactgggctctgcttggaacagccacttagtcacatcaatttggcatagaaagatgaaggctctcaacgtgcccttgaagtcagctgtcttcatgaaggccacactcccaaggtggggtgcaaacctcccctcactgcaggagactgtgcctcctcttgactccagtgtccaatgacagctgctcccaggcgggcagtccctgagtcctgtgagatgaattcacttggctggttatcaggagtggcctgtcccaaagcaaatgctgcatgagggtgagaggaaaacagcccagctggagtggtctgtttagaactactggcctgaaaaaaaaaaaaaaaaaaaaaaaaccagaaaaagaaaaaagctcctgacctaatcagcctctccaggttggagcaaaaaacctcagctgctattggaatcacagactccaggaactgaaggaactaagcttcgaggtagcattttatctgaaaaaggaaatcttataggttgactaattcaaataccttttgttttaagatcaagaaataggctcatggaaatgccagactggtctaaagtgagtgacactataattcatgagtcacacaggcagaatgtgaacccagggttcctgagtctcccacctttcttcctgccctgtgacctcatgccttctagacatcaggacgtttctcattctcagtctaactctcaggatcctgtgtttccaccagccttcctgcagtctgcggagaggctatattgggacttgtgcagtagtatgacaaagaagatcaccttggatctatttctttccccttgccacatgcttcccagactgagctctgtcactgggtcggggaggcctagggatcaaaggcacacccacagtgttcatctcattgtgggtgggaaaggaagaatataagcaaaaagagaagtcaagagctgtggcaggatttcagaagtgccatctcctgtggagtcttcaaagacaataacaggccaggtgcagtggctcacgcctgtaatcccagcactttgggaggccaaggcaggtggatcacgaggtcaggagattgagagcagtgtgaccaacatggtgaaaccctgtctttactaaaaatacaaaaaaaaaaaaaaaattaggcgggtgtggtggcacgtgcctgtagtcccatctactgtggaggctgaggcagcagaatcgcttgaaccagggaggcggaggtctcaatgagctgagatcataccactgcactccagcctgggcgacagagcaagactctgtctcaataataataataataacaaaaactaacataagttaagtgctcactgtgtgcctgcaaccatgctaagaggttggtctctatattgtctcatttactgtcatgacaacttgaaaggtacatactgtagttattcccattctaccagaaagggacatgagacttgacttgcctcaaatcccaaatttgttcccagattctgtctaacaacaacaaaagccactcactattcaaactgtgtcttgggaggataccaagcagggaggtgaggtggctgatcttaaccgcatactaagtccttccatgttatctctgctaccagaacccccttcctcccctcgcggctcctcaaggaggaaccactctccacctggaacccaaggagattttcttcccagcgacaggggcagagaatggcctcttgcaattccccatccagctggagaatttaaggattctgttatttcctttccacagctcctcttcaggaattcacgtcctgctaccggcctcaggacatagctaaaaataacctctggtttccaaactgaaagccctgtctgttgggaggctttgccggtgtgcgcctggggccggaagggctgtgtcggagtagctgaggtcagcctgagtctcatgccggtgttgccttcctctttccaaggaagcccagggcctcatgagtcaccccgaacaccctgggggagtcgggttggaggagggagttaggtgggacctactgtggcaccacggtggctgccaggccgaggatgcagaactgaacaagaggaagggtcgttcctaaagaaactctaggggattctctaagtggtgtctgttctaattataacccaatccagccagaatggggagttgagggagaaaggcctctcctaagctgccttggagcaaactctccatccttcgggtgtttccatccctgccaccttatgtgcccagagttctgtctggacttgcctgagaaggttgctggatgatcttccagctgagaaaagctttctctgccggacagctcgctgccttctcctggtgccgcagtcacttcccactgtccctctccataagtcaggacagtaccatgatagtgatggaacaggccctgctctctgacctccaggtcctgctctctgacctccaggctctgctctctgacttcctgcccctggcccagactgcccctggctacaggctgtcctcaggagccccaccttgcccctctgggcagcttccttggaacagggaagaataagcaccaaggctctggaagtggaggagccttaaagcctgggagtcaggaggcagggggaagagtaaaggagtcagggctagagactgggcttcgagcatggcccactgaggcccgctggtgatttcatggatgctgaaacagtcaggaggccccagcagtgcctgaaatgagactgaatctcacctcaccaccctttgctgctccccacattctcccaaatctggtacccctgccccaggtggctgaagctggactcagccagccagtaacccctagcaaggagactggttctctgtgtgtcctggcttcccatgtgctctgcctgcagagaggcagaggttgaagcaatttcccgaggacctggctacctggcagcagctgggcgtccaccttgagaaggatgggggaatctcaagagatctgcctgtctcccgagggcttttccggctccggaatggcacatgtgggaatcccagtcttgttggctacaacatttttccctttcctaacaagttctaacagctgttctaacagctagtgatcaggggttcttcttgctggagaagaaagggctgagggcagagcagggcactctcactcagggtgaccagctccttgcctctctgtggataacagagcatgagaaagtgaagagatgcagcggagtgaggtgatggaagtctaaaataggaaggaattttgtgtgcaatatcagactctgggagcagttgacctggagagcctgggggagggcctgcctaacaagctttcaaaaaacaggagcgacttccactgggctgggataagacgtgccggtaggatagggaagactgggtttagtcctaatatcaaattgactggctgggtgaacttcaacagccttttaacctctctgggagatgaaaacgatggcttaaggggccagaaatagagatgctttgtaaaataaaattttaaaaaaagcaagtattttatagcataaaggctagagaccaaaatagataacaggattccctgaacattcctaagagggagaaagtatgttaaaaatagaaaaaccaaaatgcagaaggaggagactcacagagctaaaccaggatggggaccctgggtcaggccagcctctttgctcctcccggaaattatttttggtctgaccactctgccttgtgttttgcagaatcatgtgagggccaaccggggaaggtggagcagatgagcacacacaggagccgtctcctcaccgccgcccctctcagcatggaacagaggcggccctggccccgggccctggaggtggacagccgctctgtggtcctgctctcagtggtctgggtgctgctggcccccccagcagccggcatgcctcagttcagcaccttccactctgagaatcgtgactggaccttcaaccacttgaccgtccaccaagggacgggggccgtctatgtgggggccatcaaccgggtctataagctgacaggcaacctgaccatccaggtggctcataagacagggccagaagaggacaacaagtcttgttacccgcccctcatcgtgcagccctgcagcgaagtgctcaccctcaccaacaatgtcaacaagctgctcatcattgactactctgagaaccgcctgctggcctgtgggagcctctaccagggggtctgcaagctgctgcggctggatgacctcttcatcctggtggagccatcccacaagaaggagcactacctgtccagtgtcaacaagacgggcaccatgtacggggtgattgtgcgctctgagggtgaggatggcaagctcttcatcggcacggctgtggatgggaagcaggattacttcccgaccctgtccagccggaagctgccccgagaccctgagtcctcagccatgctcgactatgagctacacagcgattttgtctcctctctcatcaagatcccttcagacaccctggccctggtctcccactttgacatcttctacatctacggctttgctagtgggggctttgtctactttctcactgtccagcccgagacccctgagggtgtggccatcaactccgctggagacctcttctacacctcacgcatcgtgcggctctgcaaggatgaccccaagttccactcatacgtgtccctgcccttcggctgcacccgggccggggtggaataccgcctcctgcaggctgcttacctggccaagcctggggactcactggcccaggccttcaatatcaccagccaggacgatgtactctttgccatcttctccaaagggcagaagcagtatcaccacccgcccgatgactctgccctgtgtgccttccctatccgggccatcaacttgcagatcaaggagcgcctgcagtcctgctaccagggcgagggcaacctggagctcaactggctgctggggaaggacgtccagtgcaccaaggcggtaaggaggcacacacctcgctctgctcctgctccatgacacaggttccaaccttcctgtccatgccctggggcacatctgctcccacaccaccatggacctgaaatgaaagaggttttcagactcaggttatcaggtggtaaccaataacgcagggtcttacgtacaccagatacttgagatatgtgtgttgatttgttgtcatttcaaatatatgtattgagtgcctacatcacatcaggtgctattgtaaatgctgcaggcttcagctgtgaaccatacaaccctacaaagctcactgccctcatggagattacacgctagttgggtgagacaaatgaacacataatacatgttagtttgccaaatggtgataatggctatagagaaaaataaacaggaaagggggagaggcagtagctgagaggactgactcattgagaaagtggtgtctaagcaaaaactgaggatgggaagaaagggagccacacaagtgtccagagaaagcattccagagagagaaagggtgaggagaatgtgcaaagaattcagggcatgcctggagtgtctgaggaacagtaaggaggcaactgcagccagatcagagtatgtgagagaaagagcagcaggtgatggggtccatcagaagtaatggggaccaggtcatgtacacacagagctgtaggccactgtggttcccagtgagggggtcaagtggagatcagaaatctaagtcagaggagagggaagggagtctggcttgaccaactgatggaaaactggagaagaatcaggagtgtgggcaaaggcaaaagaggagaggatgaaaagctcagaatccagacctgaggaaagcagagacaagaaaatcagtggcaagcactgccctgtcagcggctcatggtgctgccatcaaagtattcatgatccactcttcttccatcattcatccaaccatccaatcatccattcatttatccacccatctctcctttcatccatcccctttccttccctccttttattctcctatccatctatccctccatcctccttagctctctccctccatgcatctctccatccatccatccatccatcatccatccatccatctattcacctatttacctaaacctccattcatctgtccctgatccttcccttcattctttcctccatcccttcctccatcccttcatccatctctttatccactcatccctcttttttctcccttaatctatgtctccatatctttatctatccatcatccatttgtctacctagccctccatctatccattcatccctctctttattcatccaccatcatccatctacccatccctctattcatttacaagtagtattgaagatcttctgaatgcctggcactgtactaggcactggggttgcaaacataaaaagacatgatcggctgggtgcggtggctcacacctgtactcccagcactttggcaggctaaggtaggcagattgcttgagctcaggagttcgagaccagcctgggcaacatgacaaaactccgtctctacaaaaattccaaaaattagctgggtgtggtgatgcacacctgtagtaccagctactctggaggcctgagcacgggaggtggaggttgcagtgagccaagattgtgctactatactccagcctgggtgacagagtgagaccctgtctcagaaaaaaaaaagacatgatcactagtctcacagatcttataatctagtagggggaagagagagagagagaggaagagagagagagctagagacagctggcaacataatgtagtggctcagagtttgaggttctgagacaaaagccaggcttcaaattccatctgtgtttcttcctgccttcttcagaagcaccttagcatctctacattcttatctgtgagatggaaataataatgcctagctcatgggatgatcagatgagataatacatggagagattagcaccatgcctggaaatgttaggtttattattacacagggagttaacagggagtgtgagaagtgcaaaagtaggtttcttgtacacagtgctgagggctctggatctgcaacctagaaaaaaatatatgagaccaaggggcccatacggctaccttctgagtactctaaattgaaggtgcctgccgttgggaccaagcaccagtacttgaagcaagaaaacatcattccaaggctacgcttctattcctgtcatcatttgcttggtgtggtagaagagtcgtggttaaggctttgaagtaaaccagatggggattaaaaatcagtcctaccacttactccttgtgtgactttgggcaagttatgtacctggtctgagctgtaaatttttcgtctttaaaatagagataatattgtcttcttttcatggttattatgaggatcaaatggaaaatttatgtaaagtgcttagcacaatacctggaacataataagcattcaataaatgggccgctatgattattaatattaatcacagtagtaaagagccagctattttcttagttatcttactgttgtaaaatgaggaagctagactagatagtctttggtttttttttttttaacgccaaaattttatggccactggccgtaaccaatgtggagaggtggagaggaaatgtaaccctccgtaagggttaaatgcttgcagagtccagcctagttcccataacccagagggggccttgtcaggaggaaactgctgattcctgcctgcttctgagccagaggaaagaggaagatgacactcttctctgctccagagcagagggacaagcctgggctagttacaaaaggatagcaaaggcactgggagagaggtgacagtgagtggggccaggaccttagagtggagagccccttgcctccaccccttcagcaccacacccttctggtgcaagggctgcaagaggaatggccccttaaagaccctgatactccaaagaactaagacccagggacccagaaatattttggtggccttagaggggaataaggataaatgaaagaagctgtggtcccagagcttgattttaacatgactctggaataacatggaaatctcagatcaaaaatttgagctctgatcccagaaaagagaggaagaagggggctatcactcattgaatagcagctagtcctaaaggctaagcttggcaatttaagtgttatctcacttgctcctcacaatgaccccataaagcaagagttatcttccccattttacagattaaaaaacaaaggctcacaaagactaagtaagttgctcagatctccacagctataagtgataaagcggggatttgaatttagttcggctgtattacttcttagtccagtctctctctattgagcccttctgtttccaaggaaagccatacaccaagctctcaccatttgagcaaaagtaaaggtgcatcaggtgtttgggaatatctaacaatatattgaaaaacaacttgaggaggaaagaaattccagccaatcctaagggcttaggctgagaataaatcttttttttttttaatagttctggagatactagaatcaataagacagtagcaaaatctaggattaccaggtttttgcttctgtcatcatttctcaaaagctgacttgggctacgcctgtgcccagactctgtggccttaccagccctgcagaaagtgggaaagaaatggaagccatgaaattaaggacttttagagctcaaaggaagcttgacaattacctgttccaatacttttactttacagatgagaaaactgaggctgagacatggtacatgacatatcaaggtcacacagctggtttcagtagagaaaggcctaaaatctggatcactttcatcttagccagggcagtagctgcgtgtagtgtagggatgagatgaggaagagaagcacacaatgtaaaaagtgtagctgataactctgacctgcctttctagggagctagaattcccgtggttggctccagtggtgtgctggtaaatattaaataactggctctatgcaggcaggggagggagaggagtgctctggtttgtagcctctgccaattgccatggtataaatacacctatcctggctgatttcaagcatcatgggatgtcactgaatgcacagttattccctaacagctggcttcagcacaccacagcttcactcccttcctgagaaactcattccttctgctctgtggggctcaatattatcccgggttcaaaagtcatcttaacctaaaaatttgttttatttcctgaagaatatacacacacaagtgcagcaccatcattcctaccagtaacaggagcagcagctctctacaaaacactgtggaaccacaaaaaatgagtctctgctccttttgggactgagaagagaaaggaacggaagtccctggtttaaaaaaaaaaatcatatgccataacttataaaccaattattccaaagaaatgaggctgtcaacgagtgatggtgtgtcagcctgctcttccctggtgagggtgagaggaggctgaagggagcatgggggcaggctgttctgctgctttctatgatttctacgatagccatttccttcctcctctgggatgccttcacagacccagaaggaacagctgccacaggatgcggggctctttctggcccagagcctgcagcctttgccacaggattccacattgtgccattaactgggccatgtcagagcactcattctgacccagccccgtgctgagcactgtgtacagaatgcaaacccctcagcagcccctgcctcaggaagcattatggtctttgtctttcattcttttttagatgagagacctaagatctttcttgagaccttagaaatcatcaatttaacattccctttaagagccctacaagaggaccctgcttgtccaagttttcacaaccagttagtagcagaacaggggataggatcaagatcttcctactttctttccagcaatttttttttttttttttttgagacggagtctcgttctgtcgcccaggctggagtgcagtggcgcaatctcggctcactgcaacctccgcctcctgggttcaggcgattctcccacctcagcctcccaagtagctgggactacaggcacacaccaccacgcctggctaattttttgtatttttagtagagacagggtttcactatgttggccagaatggtctcgatctcctgacttcgtgaactgcccgccttggcctcccaaagtgctgggattacaggcgtgagccaccgtgcccggccacaatttttttttcacttgctcaaggtgatcttctttcaaacatgctccagtcgctgctgacagatacattatggagccacaccaccactctccttaaaggctggaaatatgaaggacaccacctccagaattctctcttaattatatttacccaaacattgttgaagatctataatgcacaatagtggaaagagttggacaacttaacacaaatcttttgcatgcattatttcatttgttccttcacaattctatcagaaaggtgggcaggtattattccaaaggaagaaactgaggcataggtagattaacttttccaaagtataaggtactgttcgatatcattatgacacttctgatctctttccagtatggaaagatagtagggagctagaattcccatggttggctccagtgacgtgctggtaaatattaaacaactggatagttgaatggcctaaaatttcttgcacccaaagggagaccctacagcccaagaaacaaacaagaaaccctttctgggctggtagaaatcctgtaatgttgcctttagactgattatccactgaaggaactcttgtctgaaatagaaagatcccacagaatgccatggtcctgaggaacattaaaataaatagaaaatgagttcaggcacttagctttacaaattgatcctggttctcctggcagaaaggtagatacaggtgacgccagctgagtggaaggttgctgcctgttctttcatctggcttcataagaaccaacatggaatttgtgggtgagctggtgagaagtttttgtctgcagcttgtattagggcccctgaactcccatgtctgcctctctgaggcctggtgtcctaaggctggaagttgtggatatgggtcgtgtagagacttcaccatgcctccactgttactcaccccaattccttccgcttccctccagcctgtccccatcgatgataacttctgtggactggacatcaaccagcccctgggaggctcaactccagtggagggcctgaccctgtacaccaccagcagggaccgcatgacctctgtggcctcctacgtttacaacggctacagcgtggtttttgtggggactaagagtggcaagctgaaaaaggtaagagtctatgagttcagatgctccaatgccattcacctcctcagcaaagagtccctcttggaaggtagctattggtggagatttaactataggcaactttattttcttggggaacaaaggtgaaatggggaggtaagaaggggttaattttgtgacttagcttctagctacttcctccagccatcagtcattgggtatgtaaggaatgcaagcgtatttcaatatttcccaaactttaagaaaaaactttaagaaggtacatctgcaaaagcaaaaaaaaaaaaaaaaaaaaattgctcttcattcccaaatcaagcaaaactaagtttttgattatgtgcattataaatctccaaaatcgcaaatccttccctagaacctgtaaacttgattatactggtctttgttgaattcagagaagttggttgaagcagattactggtcccaattctaagacctggggtaaacggtgggtgctgctctctgatggtatatgatgcctgaagaaaacaccattctccagtctttcctcttcctgcaatcacagactcttcccttcccagctccccacccagatgtaagctgccaggtggaagtagacattttaccttgcgcctcccagggtacttctgccagctggagggcacaggctgtctggggatggcagcatgggaggcctcttgtgcagcaggctgaagccaacagcttgtaccggcttgtctagtgcctagggtgcagagagggcgcacaatctggttcattatgtgggattagagcagccacattctttccggtctcagctaatcccttttcccaagcttaccctcctgccacctttccctggtcccagcacctgtggatcaaggaacatgcaagacctcactgcatctcaccctttgatgttgacatcaccctggagctctttcctcctaatccatttagagccttgggagggatgttgtttggaaatgtggaaggagggtaacctggagtgagcccaaggaagaatttctatgttctgcttgttctgaattactgccaggggaggtgagaagaactggtctgggttcacctagcagtgctaaaccctccaggcttcttctggttctcatgataccaaagatatttaaccatttcctcacttgctgtagaggttcctacatgttcctcttctgtgccctccactctgcctgggactagggaccctagcttggcttttcggcacatggaagagagaaagaatgtggtccttgcatttgcttttccaaaatgggaagggaaggagttgctgtgtgaaattctgctaagatttaaaagtggcttctaccaagaagcaattcagcttggaaccctgaggccggctacttccctgctcagccagggtcaccacatccagttgagcaaattgtgcctggcctagaaggattgtgttaacgggcctagtgggagttgaaatccagcctgaactctccctgtcacatcatgtaccctgtggtataaacatctgctcatgggacttctcttactaagtcatctacccatagggaccaccttttcctaaatggcacacaggctctctaagggccagcagaaaccacacaggctagcgtgagcacctttcccctaccttcagtcactgctccaggtcatgtgtgtcattctgtctccttgattctcttgaaagttctgtgaaaggcaggggtcatgctttttggactgttcccttcttcccctttaatcctgtcaccgagtgttcactcatgggataggcttcaaaactgctttgaaaaatagaaccattctttaaggaaccttagagattgcctggcccaatactctcattatttgacagggaaactgaggtccagagaagaaaattgacttgcccaagcatagagatctaggacaagttgcttcttgccttgacacccaatttggcaccatttttacttaaagaagtagctctagagcccagggagggagactgagaatgatcttcaggtccaggcttgctacagaggtcagctaggggccagtgctttcactctcttcagatctagatgtgaattaaggaatcagtgtttgctgaatggatggatggatgagaagtgaataaaggaaaagggacccaaccagatacaaagggaccttgagttgactttccccatatctccatgcatcgtgcacagcacacactaggggctgcttggcatctatccaagtcacacacctgagttggccaagttctcctggccttattgaaaccctgacggacaagttactgtggagaccagtcagcaggttcaagggcaaagctgggggcgtggttacccacagcttgttctgacctgtgatttggctgcttcttctcactctttgcttggcctttctttggcggtttctatgagctcatgacacccctccttcctcctctgtgcagctcacccttccttcccacccacgctgctttgaggtacttgacattcatacccaggcccctgctggcctcccatctaccagcttacttgctcccacccctctccagagaaataacccatgaagaatttatggaatgtccccaggaaaccctactatggtccaggccccatagctctttcaacacaggaaggaaaataaagaaaaaaaatagctaagagtttggaaagggaagggaagccgggtgcgtcagaactactcacttctcccggcgtctgtcaggctgtccagccctcatctactgtggtctgtaggaacaggatgtccctgtgtatgtaagtttagaggaagcagagacttgctagaagtgataggaccacagggcgctcttatgtgctgtgtccacatagctgcttatacactgctttctgcaagatgcatagagagcaccctagacaagaccactgccttctgagctgcaaacatgtggaaggaacagacagaataaggttaagtccccaaaacctgtatgtgaggccgggcacggtggctcatgcctataatcccagcactttgggaggccgaggcaggtggatcacctgaggtcaggagttcaagaccagcccggccaacatggtgaaaccccgtctctactaaaaatacaaaaattagctaggcgtggtggcacatgcctgtagtcccagccacttgggaggctgaggtgggagaatcgcttgaacccaggaggtggaggttgcagtgagccaagatcatgctactgcactccagcctgagcaacagagtgagactccatctcaaaagcaaaacaaaacaaagcaaaacaaaaacaagagtttgagaccagcctgaccaacatggtgaaaccctgtcggtactaaaaatacaaaaatcagcagggcatggtggcatgcacctgtaatcccagctactcaggaggctgaggcaggagaattgcttgaacctgggaggtggaggttgcagtgagcccagatcgcgccactagcctgggcgacagggcaagagtctgtctcaaaaaaaaaaaaaaaaaaaaaacctatatgtgcaatgctgcataagctaagggtcagtgcattgcaggtgataagaagacatgcaaagattcaccataagggtggaagaattcaaacaaaacagcaactatagtgtgatcaatctgcaaagctttactgaaaaggaagattaccagggtctgcttatagactagatgagacagaagaactgatgaactgatgagttgggggagagaagggcattctagaccttgggtgccacactgagaaggtacaaagcatatgcaatgaaggtccaacattcagagaagctcagaagacttggacaggtaagaggggagggagagccctgtgaggctttaagccctaaggagatcaagtgaaaaggatcttgggattttagcgaaccgtgaggttgacatgagccaactctgtgatatattgcttcaacaaagttagtcttcatcatgataatagaagaacagcttctatgtcacgagacacagtgactccactttaccttggagataacatcgcaagagggtgttaagcaaactcaagtgccagataaacaagagctggatcgatgtgggaatcatgctatgtgaagggaaaaagtgaataaagcaggacatagaacagctgtctttacataacataatttactgagcacttattatgtgtcacatgctattgaagagctttatatctgttaactcatttactctttatataactctatgaggtaggtgctattatcacctccattttaaagatgaggaaatggaggtcaagaaaggttaaaaaataataataaagtcacacagcaaataaaatggcagagctaggacttgaaatgtgattacctggttttacaatctgctggcttatccattaagctatggaagatgaattaggcttattcagtgtggccccagagggcagaatagggccactgggtaggcgttacagcaatgcagctttccccttcatataaggaagacgttttttacagccagactgtcccgtgatggtgagagctgacccaggaaggaatgaggtcctagtcagtggaaatatgcaagcagagactggatggtcaccaaccagggtgctgtcaaggggattcctgcatcaaatctcagatcttctcaatgatactgccactgtttctctggctctgtcagcaaagcgtgcgatgaaggaggacaggctgaggcagagaagaggagcagaaaagggaagaccaaggtcccctgggtgtgggctttggaatgaggctggttttgagcctgcccttagtgtagcagaaagcccctcagggtcaggtaggaggggcttggcacagacagggcaaggcatggcctggatgatgaggacaggcaggcctagggccagatgtaggggagggaaaagcaggttatcctggggtctgggtccagttcctcatgacagcatccctcctggttaagaataggcagtgggagtccagatgatagagattaagtacaaacaccaaagcagatggagatggaggaagagtggcaacaggaactggaaactcattttacatgattttccaggtttcagggcggagacaggaggcaaatcaagctcatgccatggggcaaaagagggaagaagtcaagctgagcaagtgaaagatgccaggacaatggaaggaaggactatcttgggttagggtgaagttcctttggtttcttccttccatttgcagctgctaaactgccgcctcaacccaggtttcacatccctgcagggctcctcacagaagctggggggtagtgttttgccgaggctctctagcctcttagtcccagggaccttaaacagcagcagatgctgctggctctcttttccatccccaccagaaacctcttctgctgctcaagcattgtgacatgtcctttattctgtcccttcaaccactatgcatggcaccctcctagaccccacagcatctggcaagggagcagctgttaaggtgtctacctcccttgagattcacagatctttgagggcaggggccttccttttcacattcatcacaccatccccactgccagatacacattaggtgctcatgaaagtgatctcaaatgtattgggtgcctattctatgccagacatctatttgtacgaattgaaatagaatcagacaccaacggtgactcctgttgatgtggttggttgcgaaggaaggaaggtatgatgtgttgggtaggtcagtgaggggaggaggagggttggcgtggcagtggcatgaggagtcaaggaaacaggacaacttctggtgggtaacaggaaaggagtttgttttctggttaacaacatctggaagagggtggggtggtaatctcagaaatgttggctggaggaaggggacagcatttacactgttgcctggagggccccagaatagtacagacagccatctgcttcacctggatcagatgcaggcttgtgtataacaggggaagcaggaaagaatgcccagggaaccactgcttcccccaccagtctctgtatgactcttgggatgtttttgcaaatcctcagagactttccaagctctggggagggccccggcctattctggcactaccttctttcccattagctaatggtggctgctgaaatgcctgtgaaattcttaaaggaaaattctttctgcctttccctaagggacataccaacccaaggtctccagtccccagcccacaggaagccctgacgtcccaattctattcttctctttgtaatcgcacaaacgatttactaagcaaagccaggaaaactgtgagcttcttgcagtagcagcttaggcattggaaagaatccatcaggagcaccaaagtattaactctcctcagccctggggttattactcagttatttgataacactgactgtttacaagatacgtttccgtggttcttttcatcttcctcaaatacttcaactgagggtgctgatcgcccctgcatctttaccccattttacagatgtaggaaactgagctgtagctatactaaatgtcttgcccaaggttatatgctcacccccaccctccaatgccaatattgacattggcatttagactttctccccaaacacactaacctgttacttggctcctctcgtggggtggagttgccttggcggatggaaggccaagttggatgaaaagctgagaaacatgcctttctctctgtgccagccccaccaaacaatagccactcattcctctgagtggaaatgattcacttgtctctcagtatgaacccttgattgagtaaacagccggagctgcaggtccacatctaagagacttagtggctctcctgggacctgagaccgcccatccgataccctaactcgcccaggcgtctcagcaatgctggacactggggtggtggggagtagagaccctctccccttccccagagcctgcatggaaggggtggggtggtggttcagggagctcaccaccacatccctagtaatgagtttggctccctgcccgggctcccgccgccaagctcgctgtttgttttgttgttctataggcctcttgggtccccagaactggtcttctgaaagctgggaaaggctgcatttggttggcacaagaaaggggcatatttacagaatgtcccactcccacccgtcttgacacacacactctggccagcacatctccttgcttgaccatggcaggtgtagacaggagatgtcggctctgtccagatccccagcagaccccagggaaggaggtcctgatctcccagagtcattctgaaaggggagaaactaaagactcatttattttttgtactttttgtgtagtttctaatatacttcaatcttggacaattcttgtatgaggcctcaggctgtgtattcagctggctgttttgcagtcttaaggttgagctcctgcagctcggggctttattgccaagcaggtgaaacacagagaactgtgttttatggatgggtgggatgggcgtaatgattcaagctcacagaatacaggtgacctaaataggctatgcaaaattttcaagaggccaaggtgctggtgtttacagaggtcttatctttaggaaaatacagacccttttacaccattaagccttgcctgtctgtggattttgtacatggacctggatctctgagtcggaagggacttacaaagaccacctggtccactctcctgccttcgggtagggaccaatttgcataacaaagagtataggggctttggagagatccagtcctgactccatcctactagctgtgtgacctctgagctttaatttcctcaatgtaaaatgaggacagttctggtaccggcatcataagattacagtaaggattaaatgacataattcattattgaactgatatttattgaatatgtactgtgtgccaggagcttggtataaagcagtagaaaataaaactgtcaaaaatggctgccctggccaggtatggtggctcacacctgtaatcccagcactttaggaggccgaggcgggctgatcacctgaggtcaggagttcgagaccagcctggccaacatgatgaaaccccatctctactaaaaatacaaaaattagccgggcatggcggcattgtgcctgtaatcccagctactcaggaggccaaggtgggggaattgcttgaacctaggaggcagaggttgcagtgagctgagattgcaccactgcattccaagctgggggacacagagagactccatctcaaaaagaaaaaaaaaaaaaaaaattcttgccctgatggaaattatctgaatgtgggaagtcagacaaacaaagtaagtaatcacaatatatattatgtttagtgggtgataagtgctaaggaaaaaatagatcataaagaaataattcatggaagggatggagtgcagagcttgggcacatgggcatatgtgcatttaaatattactacaattgtgacttaacttgtgaacttcgattttttttttcctgtggagtggggtagtaataagcactttgcatatttgttgtaaggattaaataaaatcatgtgtaaaaagtgcttaatatggtgcttggcatgcaagtgctttctattattactgatatctttgaggcttccccaaaaccccacttcttccctggctccctggggtagtgatgctgtcagatcaggctccttttcagtgacatgtttgcaaggtcagacggaggaagagaatcctgtcccctactcccagccctgagtcatgggaaaaaaatacttagaagacgggaccagctgagccgaactaatctaatcctgctggactttggcatccagttgcattagtcaccagtgagaggtttcccagtctcatatcaccaaacaatatgtactgaccccctccccagggtggggctgaaggaagtgtcagttgccctgttgtagcttcgcagaattaactaaaacaggcccattctccccctttgcatgtctccacaccaaccacagtatcctgtgctgcacaactctgccttcgatgaattatgtgatctgaggggacctcagtttattcatctggaccacccatgcctgcctggcaagattgctatgcgtatcagacatggaggatatataatgtctaacacagatcttgacataggagatgcttaataaatggcagtcattgctgcctaccacctctgttgctgctagagtgactcctcctactagtattactactaccactcctgtactattaccatgtttttctgccacagtcccaaattctctttgattctattagttcattagtcccatataattttcagatgatcaagaaggattggaggccaggcgcggttgttcacgcctgtaatcccagcactttgggaggccgaggcaggcagattgcctgaggtcaagagttcaagaccagcctggccaacatggcgaaactccgtctctactaaaaatacaaaaaaaaaaaattagctgggcctggtggcggatgcctgcaatcccagctactaaggaggctgaggcaggaggcaggagaatcgcttgaagccgggaggcggaggttgcagggagccaagattgtaccactgcacaccagcctaggcgacagagcaagactctgtctccaaaaaaagaaaaaaaaaaaaaaaaaaaaaaaagaaggattgggatatttcactgctctgttgcagatggtgattctgaaattcagagattatggacttacttggggtcaagttgtaaatcaagggaagatgtggaaattggaaccagaacgacaaatacttcagggtggagatgggcccagcatatacctaagtcacttgtgtagcccaagatgatcaagctaagagcttatggctactttaatgtctctttccttcttgctagcatgtgcctctctgtccagggaggcaggaaatacatggagatgaatgtggtgaaaatgaatctggagctctggccttctgagtctcttcctgtggttctattcttctcctggcctcagcctccagaaaggtttctaggctccaaggtgggaaagaagttcaggagctggtgccgttgggttgtcccaatcagccatccccatcctaccctgtgttatggtttctatggcaaaggctgagtgtcccccagctaatctggaaggagaaatggcatcaacaggctttaataacaaatctggaattcccacgcttgacaattgaggggaagaggctggggaattggggttaaggcccccaggggataagattgacgctatcaagcaagatcaagagtgttcccttaaatgtgtatcatagatttagtagctggaggggacctcagaaaactgatctggtctactgactttggacaagtaagatgcgtattgttctattttatgaatgagttagctgaggcctagaaaggtggagtgatctgctgaaactcacccaggttcttacccacggaggcaagactggaacccaggtttttgaattccaattttggggcccttccctatatcattttaaaggacttttttttttctttttttttttgagacagagtctcactttgtcaccaggctggagtgcagtggcgtgatctcagctcactgcaacctccaactccctagttcaagcgattctcctgcctcagcttcccaagtagctgggattacaggctcatgccaccacgcccagttaatttttgtatttttagtagagacggggtttcaacatgttggccaggatggtctcgatctcctgaccttgtgatccacccaccttggccccccaaagtgctgggattacaggcgtgagccactgcgcccggcctaaagaacattctttctgcacaaaacatcagactgacctcggcctctctagcatgcaggcatttcctatgccgaacttaaaattgatctagggatttttttccctggagcaagaatccagctgagcttcttgtaccaggcctgaccatacaaccttgatctagggtgaccaggatccctgagccctcagtccacacatctcagggatcttaccagaacctgcccagcagggaggcctacttcacttctggcctcagggctaagaagttctgacaaatcagaagaacactgaattgggaccctcaagtcttacacgttagtcttctctctaggaatgccacatttttgaatggggataggcctaaaagatccactataaattcagcacttactatatgctaagccctgggctaagtgttttgttttgtttcagttaagcctcatcaacccttgcaaattgtaaaaatcattagtcttgtttccattttacatataacaagctgaggctcaacaaaactaagtaacttggcagagtctcaatgctactaattggagagctgggatttgaatccagagctctctgactccagacctgtgcttttaaccactagctttttagcattcaattgaacttctctacgcttccatatgtccacgtgtagactaccacttgcctgatggagagctgcaagaagatgcacgagagaagaggggaagggctacctctttgcacccttttgagtgaaggtgccctggaaactcgggacatggcagctgtcacctcggcacacgctgtcttccttgtgtccctctcctcaggcctcctcctccaccttcccatccctctcggcctgggtcacaatgcgcggggtggcagccttttgtgccacacacagtccccagctgactcccctttctccaggcatcattgtttgctgtgagctttctgaaggagagacaaaggagtgttgctgacaaggccaaaagctgctgggtaaagcgtggggccagggcccatcacccatgcatccctcggagcccccgggctcttcttcaaagacattgtctgggatcttttgtgtgccagtcatacccattcagagctggccaggcaaaggtttcagtggggaggaggagcacactgagaaatggagtcattttgatctggcaaaattggaagagacattaaggcaatagttaacagccgaccactgctggggggatgggcccaaatgcttgttctctgtttatggggcttatgcaattccatcaatattgatgcctgatgcctttgattctgacactaatcattgctatgaattaaatttgcagccatataattaggattgctattaatagggccctgagctaagcactccgatgtggcgtgtctttttcttgatagaaaatggcatccttggaactctgctaatggggcgcacctgggatttgccaagaatgatgtgaaaattatacattctatatttgtattgggccttttactgaaataccagcaagcaaaggtgaggctggaggaagggttctctcctacccagtgctgtgggcagcaattaggtgtctctgctgctctttaaagtctttaggaaaggatatgccagagccaatgttggtcgctcatggtcaagcttcagacagctcgtagccaggaagttctgctttatgtctaacctaatgggagtcagtttaggctaagacactagccaactaagggaagaggaattttcctcataccctaagcttatttgaaagaggctgagccaaactcctactgatgggcccagttgggcctcatttctaggtggatgattgggcaagacccctactgacaactgattccaagggtccccatccagagagctccctgggccacagacaacccgttaatttcacacacaagggttagctctctttcatgttgagattcttttccaggtaaatttgcagcatatttagtcacggggaaacccggtctcttccggcaattagcccccagttcagcttcggtgactgtcagtgccccattcaccctcagcctgagtaatcacgtgtcgtcatgcacaagggttatctaacccttttccaacaatggcacatgtggtgacctccctttatcacttagaataataatttataccagttggcacaagggatgcactagtccctgctcttttgatcttcagactgaaaataatttttcttctaaaccatcactgattgatttttttctttcattgttttatatcattgagataagacaatggtttgagttcaagtcctaactctactatttactaagtacgtgaccttggccaagttatttaacttctcagcaattcagagttgagagttcttgtctttaaaaaggtcataataataccttcttcagaaggattataataaggttcaataagcatctaaatctcttagcacaggtctagtacacctaataagattccctgccttcccctttttctttcacctcacatatacccagatacagaggacaaaagagatagctttcttttccaacatctacccccgcccttgccacccattcttctgaataccactttattttccacccattctcagggacaacacacataaaattaatttctccaaagcaaatggtgcaatggaatctgaattccaaatgccttcagtctttttctccccacccactacaagggtgaacaggagcttcttgcccccactgccatggtttctactgtttctctttcttctcagttaacccagggtcttaggtggactgagtccattctccaattcaattctcaggaccctaccacaaactcacaggtgttcagcacctccatgaaagggagaaaggagcaagagcatctcagcaccacccaaaaccaaggctacttgaacacaggatttgcattcacttctgttgtctgccccacaaatacactgtacatttacccactctgtgtaagtgcatgcttaaaggcaagtgtgtggctagaaagtaattggctaatggtcaatattagcagagaacatgggtttttttttgttttttgttttttaacataaaaccctaggaaacagtgtgtttggttgagtcctcaagtacgtgaactttttattaattaccaaacaggtattttacttttcattcctgaagctgggcagggatgggattcctgttgggtgattgttggtgttggtgctgttttggctcctactaaatagaaaacattaatcagtttcttcagtattggaaatgtgcctgatgttgggcaagttcatggttactcgtaggtgcattctgtcatatgcccaacataactatactcgcccccttcagttatcttgtcactagcaaggtcttgtatggcacaaccaaaccccaaaactagactcccccatgaggccatataatgtaccccccacctcccttgtaccttcagtctttcccgtagtctaatggctgcccctcttgaagctgtaaaatgttgggtaatgtaagtctcagacggattggtggtatccccagaggaatggtcatagacagagaaatgaaggaaaaaatatgcccaacctccccccaccatcaaatcaaagaaataaaaaatctgtctccttgatgcctccccagtatttatgtctgagctcagcagacacccctgggctgcagccagtctgtgtattagcattagtccattacgctttttatgatgcatgttgcccacccctaaccccccccccaaaaaacattttatgactatccttttcatttctggaaaaagcttcacagaatggcagatgcctgaatctccccactctttggggagctatttgtaggcagcctgtcccaggccataaacaatgggagataaaccacagccactggcagtaaatgcagccaaggccatggaggtgcaaaaagtagggggtgggataagcttggtggagtcttgtacaagcacagtgcctggtgggtctgtgggtctaccctactcacaggagagtcaagagattggggccaaagtggttgccaccctcccggatctccacaaaagctagagggaaatcttaccactctccctcatgcctgtcttccctagtgaagccatgcatcccttaactgtgatcagaacctgtcaactttccaatcagaaggagaaggtgagctttggcatcattttctcctgctagctcatgctgctacctagattactacatgccactcatctcccacggatgcttctagatcttggagcaacttcttggaagtttctctgccttctcccactcactcttcttgtgacacccacccctacctcttcctgctccactctctaatgctcttctgctcccttattgtcaagctcgagtcttaccaatccatcaccactacttctggcttattaaaacttcagcgtggactctggtggccatggtggtgatatgtatttataccaccttttgagctgtacccacaagcaagtcacataggacactgcaggaaacagcaccttgagccagctttgctccagaaaaggtgcccttgggaaaagaaaaccaaattctgaatgaatactagaacagtggagatttctgattcttcctacacacacgaaacagcattcaaaagcaaagaaggagatggaggggctgggaggtggagaaggacagcagcaaagccctgaataattagtgcatggcggggttttgtttctcatctgccccatcttggtggcaggatgtatagataggatggaggtaatggtgttctttttcttttccttatttggttttggactccacatcaaatggagacatgtagatgaaagtggcgtgcatttaaaatgtatgtacacatcagactgctggagatggtagatattatactgcatgtatgttttttttttctttcttttttttttttttttttttgcagtaagctgctaaattatttattgggcactgggctttaatctcataaacctgccttcaggcctcaggcaccagcagcctaagcactgcataaaacacatacatcgggtgggctgcatggagcactccggtgactctaggtagtgattgttcattttcattcggccctttcccccagatcagctcattaacagcaggcagaacctatgaagagccttctagttttcccatcactgtgaacttggaaattgatttgcatctagtagcagacaggggctcccaacctgagcacaacgtaccaggggaactgtggcaagaggctgttctcacagtctctttccttggctgagggataggcctaaaaagatggagtaaacgactccaggattacaaaccattgctggattatccagagctatgcgccctaagctatgaacccccttaagttcccacccccaggactcataggtgaatgatcctggacaagtgttttttatttaaaaataaaaaaaatttttttaataaaatttttcgttatttattttacatttaaaaagtttttttagagacaggtcccactctgtcaccccagctgcagtacagttgtgcaatcatacatagctcactacagcctcaatctcttgtgcttaagcagtcctcctgccttggcctcctaaagtgctgggattacaggtgtgagcgactgtgaccagcccagacaaattttttatattttgggcatgaatttgccttttctaagtgaaagagatctttattatcctccctggttccaaggcctgagagcaactctcttggtatgaatctccttgtcagtctcttaaatgctaagataataataacattcttaaacttattcattggtttcagttatataaagagctttcataaatatacatatattgcccatttttatctcattttgtaatcctaacagccccatgggctgcgatattatgggtgaagaaactggccagagtggtcaagtgatttgtcattatcactcagtaatgacactgagattagaacatggatgtccatcctttgtccacactaatcattgcctagatgtgtgagctaagtagcattacacgagtatggaaactgaggcacaaatcatctctggcaccaaggggccctagggctatgagggagtaatgttaacaccaatgcccttgtcatggaaatgtgagcccaaaaagggttgtgctttccaaaccctgggcctctgctgtctttgagcaaatgaagcaatgccaggactgtctgggtttcatcattcactgtgctgcagcagccaaaaccttatgaccctcccttacaaaatcagtaagaagaggatattgcggtagttggatgcacagagttttcatctatgttccaggattcagggggtctgtgatctaccagaaaaatgttttacaaacatttgtagatttagttttttgtgtagcgggcccattgcttacattagattctcaaagttgtctatgaccctaaaatattaagaccctttgtctaatggtttttttttttttctttttctttttcttttgagacggagctttgctcttgttgcccaggctggaatgcaatggtgcaatctcggctcactgcaccctccacctcctgggttcaagcgattctcctgcttcagcctcctaagtagctgggactacaggcatgcatcaccatgcctggctaatttttgtattcttaatagagacagggtttctccatgttggccaggctggtctcgaactcctgaccttaagtgatctgcccaccttggcctcccaaagtgctgggattacaggcatgagccactgcacctggcctgtctaatggtttttaaaaagtgtgcctttgagttctaggccactcccaactcccaactccacccttcttcaatcaaagtatcttactttcatctatttcatctatctatttcttctagtagggttaggagtatggtttttttgttgtttaaaaaaaaaggttcaaatggcagatgatgacattttaggtctgtttgatcatcacatgttatgtaccctgggtaataggcatacctgcaccacagtcaccacctgccatatgtgtgcacgtgcacacacacacacacacacacacaccatccccaaacccggtgtccatggcagcaggacaagacaaccctggaagaattcagatcagggcccagaggtgggccagaggagccagtgggcccagaccaggagaatggatcagagcagatggaaagagtggactcgaaggttacacctgggagacaaagtcagggtcatggtctttgttgtgacaccaaatcaggcagcacgggctgagagaggaggctgaagaggtagctccaaatcaatattgagagaaccaaatcaggccagaaggtaggagtcccatcagctgggtgggtcttactcccaccatgaggcaaggggagggagtccactcagggagggtaagaatcgcctcgtggatccctgaccctgacacgtcttcatgcttgttctcacctcggggctttgtgtgcagtgttctcagactaggaacccctcgccctgccccgtgcccagctaacacctcctcatcttccacatgctgatacaccacctcctctaggaagcccccatgtgcttcatagcaccccaattatgtggctgtcagagcaggagagcactgcgtttaagaagagtccaggccttggggccaaagtatctgtgttcaactcttgattctctcccttaatatctgtgcgacatagtgacaataacctcacctctctgtgcctgtttcttcatttgcaaactggaaataataataatttctgcctcccaggctcattgtgagggacatgtaaatgagttaatacatgtaaagcatatagatcagtgtccaaaatagagtgtgtactcaggaaacagtaatattattgttgtatgtactattataattgtcctttttcttttctctctccctcccctcagtacgcgccacgattttaggataagggctgcattcattatctctctatctatagtaacagctaatataaaagacattcaataaatgttttaaaagaagaaaaggagatgagaaaagtggggagggggaagaaatcctaggacaggagccatctctctgccccaattttgaggcaccttcttgatgtgagtcaaaggcgcttgcagatgtgtgctgtgtttccgcgtgaggcaggacctccgggattcttaccaatgtttgttgctggccatgggcaaagaacaaggttcttggggagtgcacatgattcaggcagtcacatctcatacacagaaattcaagccagcagtgctgcagccgaatccttttgggaccgcccttttccagagggaaaaatcctttagcctcacttagctcatagcctccctcacctgtcagtgccccacctgcaaatcccagcagatggcaggtctgcactgaaagacaactacagaggattccatcaaccttctggggtccaggactgagtagactgtactcctgccaccaaaggttcgaagatgcagagcaacgcccattattagagtgttcattcatacaattatttactcactcattcaaaaacaatgacaattacatatgggcctgctatgtgctgtcaaacatattacttgttgctaatatctgtattaattacatcaagctagtggtttccaactggaggtgattttgcagacatttggcagtatctggcgatgtcttttcattgctatgtcttgggcaaagagagctattggcgtctagtgggtagaggccagggatactgctaaacatcctacaatggatgggacttcctccccacaatgaagaattatctggtccatgatgtcgatagtactgaggttgacaaaccctgatcaaggcaaccaacatttctggagcgtcaaccatgtgtcaaccactgtgctaagcactcttcatttgatctttctaacagccctgcaacataggtactatattttttgagataagaaaactaagactcagggagattaaattattttcccatttattcacataatatgcagttattaaacaactcagtgggtagtggatttgaaaagcaaacccaggtcttctagccccaaagtctactcatctacaaaagcatgctagctctctgcacaaggtcagaaaggagaaaacatgacgtaagtaagtgatggagaagcatgagttttgggaggaaaatgttgttcataactgccactgggaatgaaaaaaaaatcccttttctgcctccttctctcccagtctaccatctatactcatatacacacacatacacaatcgaacaaaatccttgaggccccagtttgccttcagggtgacttcggtgtgggtggtaattttagcttgagattccaccctccttcccccaccccaaaatgtttctcatcttacacatacaaccacacttttggctgggaagagggtggagatatttctcctgctcctgaaatgtcttcataaagatcttctctctgccaacctccagcttctcctcgtgctgatttagtgcctgctgtaggaggtgtgggattttatttgtagctcctgactggcgggctgttggacaggagctgtgtgtgtagtgggaagagtagggactttggcatcagactatcttggttcaaatcctatcatctaagaggattatattgggtaaatcagttagccttattgagctttggtttcttcatttgcaaaatgagaatgatgatacctaccttgcagcgttgctccaaaagttaagtgaggtcagttgtgttcatcttttagtgcagtacttggcaaagagggaatactcaggaaatgctagccagtatgctcatccttctgcctcagccccaggttcgcttttttttttttctctttatctcttctcaggagctcaaagagaaggggaggaggagtcagggttcccttctggtgggcctgctggaccatgcttccctccctattctgggcctcctgtggggccctgtgtatagctcagcccaggcccttgagtcaaccacaagatcactatctttgctctgcctctgtttagagtcaggtaacacagaccacagctgccaccacctccccaggcatgatcatgtgagtgacagtcatcaccataagactctcccacttcatccctaacttagcagagattcacaacgtggctggaagtgttaagcagtggtgctggttcaccctgttaaaaatgtagcctgaaatcattcaggatcttaaggcttggagggatccccaagatgccttgtccttgtgattgtcctcatgactgtctttttgcccttttctttgcgcttctcgtagagaatgttttggaatggttagagacagaagggaaactcattcatagagaacctgccatgcaccaggtcctttccatcctaaggtggcttatcccttttcctgggtgcactacatccagcccatctggggctggagtacataagcattgctctacagaagaagaggagcttccacaaccctctgccatcttatctttggtgacttctgaaactgcagggtccagaagatccaactttacacattgcagtatgcagtatactctcacatttctcctctcatttagttctcatagcagcttgagaggttgggattcatagctccattttttttctttttttttttttttttgagacagagtttcattcttgatgcccaggctggagtgcagtggtgccatctcagctcactgcaacctccgcctcccaggttcaagcaattctcctgcctcagcctcccgagtagctgggattacaggcaaccaccaccatgcccagctgatttttgtatttttagtagagatgggatttcgacatgttggccaggctggtcttgaaatcctgacctcaggtgatcctcctgccttggcctcccaaagtgctgggattacaggcgtgagccactgcgcccagcctatatctccattttgcaaatggattgaactgagattattgagtcagtaagcagtggatcctaggcataaatccctagttttgtggctcaaagttcacagcctccatgagggctccatacctttgttgtgtcttttcttctatcctaccctaaagcaggcattcagcctatcttgctagaacctcgtgacatgtaatctctgtaggttttgggctacggtaggtgtaaaggacaataggacatgggttctttcctcaggtgcctagttgaaggcatgagataagcttgcctcctttgttcttcccctcaagacgtgatctgggggctccattctcataaatattcaggtgcgcgtcactggtggtggtgcaatgtggagctgggggagagaagcccagaaatcgggtgggctgagctcagtcccagctctacagccactgaccttggggaaatcaccccagttctcttatccctaaaatggagacattgatcatttcagttcctccttcacaggatcgtggggcaatttagtgagatgatacgtgtgaaagcaacagtaactgcacaccactgcacaaatgtaagggttagtgctgccttctctctgctacctgacccatctgatcagcagcatcagaaagaacctaacacctgcaggttttatcccgcaagtacatggcctggtaatgctctgaaggtggagaaaatacttgccagggacttttacaagatcctggtcattgtgctaacagtaagggaaacaacagtccagataggacagagtaccttgcagacgtcttcgcatagcactggctggtttgctgtctctaaaaaattttttatcttgtgagagtttcaggtttgctttcatgagtcagctttagggaagtaagctgaaagcacagtgcagaaaagatttcagagctcgagttgttcaggtggtgttctttggagcgcatttgttgttcaggctgttgctcctgcttccctcccttccaaatccagcctccctacggtctctctcacacacacagaaccaagatcagcctctctgggctatgtaacaaaaaccatctttctcttgctggtccatgacataaccctgccagtctgggagctattactttttccagatgtggaataattgcagggctaatcacccctggagactgctgggacccttctctaagggtctccaggtcctttcatttaatcctcatgacagtcactaacaataaagaagaaagtggtagatgctgagtgaggagctaagatatttgtccagagacacagcaagctgcatgtaattctggttcaaaattcttaggtctgcaaaaaaactgaaaaatgtctcttgtccctcccccaccttcctacaggaaggattttgtacaaaataacattgcaggccgggcgcggtggctcacgcctgtaatcccagcactttgggaggccgaggcgggtggatcatgaggtcaggagatcgagaccatcctggctaacaaggtgaaaccccgtctctactaaaaatacaaaaaaaattagccgggcgcggtggcgggcgcctgtagtcccagctactcgggaggctgaggcaggagaatggcgtgaacccgggaagcggagcttgcagtgagccgagattgcgccactgcagtccgcagtcccgcctgggcgacagagcgagactccgtctcaaaaaaaaaaaaaaaaataaaataacattgcaattcccaggacagcccttcattccttagctacttctctacagatgtggggccacctactctccccctatcccattttctccatcaccgcctcctgcctccaagcctacctttctgaaagatgttcttgacactgtcattaaacagctgccagcaacacctgctggcattctctgttgcaaagataacaacccaactttaaaaagagagaatacaaaacaagaaaggctatgggaggtgtggttgtgggttttggttttattgtgtttttttccgtttgtttgtttttttgccaaattacattttgtacatttctctgttgattctcttattcctttgcattttctattctctatttatgaaccccctctcccaacccccactttaaaaatcaagaaaaggaaacctgtttcaggattaaatatggtgtcaacatgtggctaggatctgaatacctcaaagagaagtcacaggggttgtctccacctacccaagcctttaatggtggagaaggaaagatggatttaaaaaagacggaggagccagccttttcctcctaccctcctgggcctccttccaacaaatgatgatgcagggtgatgaagatagcgctctcagaatctgtgcctagtgataactccctcagaaagtcatggggatgctttccccacctgtgcgtgtacactggtgtttcttctgtttatgcaaggagtcattgcagggagggctacatctagtctgctgccccagtggttgctaagtcttgatagacaccacctctatctgccctgccctcctgctcacccacagagatgtggcccattctgaaaccaccagcacctcttccttgccacacctgtctctaagtgccattggatcccactgcacaactaattcccttttgcagccagctggaggaacacaaagcttattactctcttaagacaatagctcaaaagtgatagtttctttttttttttccttttttttttttttttttttttgctttcagagaccaacaaggaataaaggggcagcttcagcttcaggaaatcgagttgtgttttgtgttgccagggggttgggggctggcgagggctgaagaggttgggttactggaagcaagattcaagggagctttgcagaggtcaaccccaagcagtctttgtgggaaccatcaaactgatgactctgctgattttctatagtgtcatggaaaaggattgtagggaattcttgccaagtctttagaagaaaagatatatatagctaaagacatgtatatttatagagagatatatggatatatttatgccagtcatgccaatgagctctgcagcgaggagaggcctctagagaagagcagggcaccaggatctccctgcagcactttctggcccttgggaaaaggaaataagaacatcatcgaaggtacctggatctgtggccttaatcctgagaggccccacctcctggactgagagggcctccttaacaaggccaagccaggagttttcctttgaacggttcagtcaaatccctgcagcctagaagacaccttagaaggaaatctttctgggagtctttgatccctgaggaacctaatgttcagagcagagtgtgagaggcagggattccttatgggccaatgccaggagtagggagggggctgatgggagggctgagtgctccatgcctaaaagaagggaagaatggccccaaattcatttttgcttccacctgtgggcaaaaagcttaattggactgttgggcttggaagggcccagaccctgcttttagaggaactgggaggcttgcctatttagctgggaccatctgctggccccccgcttaagcctgggggaacagctgaggcttactgagaaattgggctaaagattctttccagaaatctccctggaactgcatgaggcgtgtgtgtgtgtgtgtgtactctttgtgatttctctgcaccagcggatctcttaatgtgagtaaagcagcgcaggctcaagggtgagctgggcgggaggctttgctgggtgtgcccaatatctggctttaacatctctcattccatctccatcatgtcaacagctttcaagattgactgaagcataactgcttgcttcatccccagcctgtgtgccccttccatccctgcctacacccaaccctgtagaggccctggggtgtgatgagtaagtcagggtaatgacaccacacccacattatctagggctggccttggtatactttccttggtttttttttttttaagcagggggtggagaagggaggcagaatatgattgcaaaacctatttggctgtagctaccacctgaattcctcttttgctacagacagcgtcccccttcctccccaggcaagttaaattgcttaggactggcaaagagactcagagtctaaagaaaaccttcgggttggcagaataaacattcttacccgtcccttccctcctccctgtctcaacccaccccacatctatcctctgggccagttagccctcattcctaaggagcaggctatcatgtgaacatctggggaaatcaagaatgaaagttacacttgagtaaaaacttcctagaacagcactgtccaagataacattctgtgatgagaaaaaacttttatatctgtgctgttcaatacaatagccactagctacatgtggctattgagagattgacatatattagtgtgcctgaaaagctgaatttcttattttacttaattttaattaatataaggataaatagctacctgtggctagtggctattacactggatggtacagttctagaatatgaagtagaaataacttagaagtctagggtaccatgaaagcctaaaggaaaagtctccaactctcagtcccagttgaaaagggggcagttttgtaagatgctacagtgcaatttctttttcatctgccccagaataaaccaaattcccagcttaaagcatcagacgggcctctcttggtgatctgtttcccaggtaaaagaaactgaggggtggataagcaggagtggggcccagcaccgtcccccacccccaaagaccccccccctccctctctggcacctggctctggcttctcgtctacagcagggaccccagtggggacgctgcgcagaatggtgctgcaactgcggacatctggtttccctcccatctctgccccttcatttcttttctgtcagcaacagctcctggctgtggatggtcagcagagtcaacgaggcctgcagacctcctttccggctccctctactcccccatcccctgctgaggaaggttaagggagaaagagaaaaaaagagacaggaaggcagagtgagggtgaaatgaaatgttagtgacattcaagaaagtgagttcatggggctctcactgccctccctccggattcaggatgaaccttgtctggtttataagccatcagtggcttctcccctgtctgagttgccaaactcttgtgcccccaccctccatggctcactgcaacacatgtgcctcctcccatatcatggcaggtccatctgtgacctttgttcttctgacctctcccctagacgaagggggagccccagaggaactttccctccctatcccagactgaatacattcaacctgcctctctgtacagcctcccccagtcgctgtgggtaaacaggaggaagagagaggaaaagctttctttcttgactaggaggttggcagccccagcttgattccacatgggaagaagctattcctttttctgatcttggctccttggcttttactgtcccctacccctagccagaagctgcattaattcaccgggtcactcagcagccagattctcctctaggagaggctgagctgcccaacctaggaatgggctagaacccagcagtactggatgcaaactccccgcacagctctgcccagctgaaaggctgcccttcaaaccccttttcttgctcagaactacaggggaaagcaggagagcccctgttttgctacaaacaagcagagtgatggcaaatacgcctcagttttcctatctgcaaaatgaggagacggcctcataaggcccttccggagctccattccatgaatgcagtgtcccaacattgccactcgcatgggcagagcaagacgctttcagtagctatggaactgccaaaaaattctcttgcagttttttggtggttctgatttcttttttctgtctttctttctttttttcttttctgagacaaagtatcactctgtcacccaggctggagtgcagtggcgcgatctgggctcactgcaacctccacctccctggtgcaagcaattctcctgcctcagcctcctaagtagctgggattataggcaggcaccaccatgcccggctaatttttgtatgtttagtagagatggggtttcaccatggtggtcaggctggtctcgaactcctgaccttgtgatccgcccgcctcagcctcccaaagtgctgggtttacaggcgtgagccactgcacccggcctttgatttcttaaggaagagagatgaacccattgctcatctccttctactggtttgattccttttgtcttgagttctaagctctggagctgagctgagctgagctgagctagactgaacaggccacggtgaaagagacaggagagacactaagtcaatttgcctttgtttgtatagcagctagagcagggaggagttgaaatgagataatagaaagaacttcctaaatgggacacggtctcaggggagtgtaacattttctttcctagcaaaatttcaaaataagaaagttggaggagaacatttgcctcccaaaagctatttttctggacataatttaaaattacagcttctcctcctatcgctctgtattccgccacttcccatccctggacctcatccctaccttcacagtgaactcgggcccacaacggcctggtctacagatggcggaaagaggtgggaggttttgccagagagcaggggtgagattcccctcccagcccctctctgacttctgacctctgcacctttcttgctagtgatccctaaattactgggctgtctaaccctctctagggaggagggaagcaaacagggctgacgggaggtggagcagagaaagtatgaggtggaggtcaggggtcttttcacagtgtgttttggcaaaggaagcctgtggagctgccagtgggatcagactttcatctcctgagctagccccctcactgggaaagcaaaagctgtcactggagctgtgatttggagcatgtgctctggggaactaggctgcacccctcagggtctggccccctgaaggaaagaccagagaacagacagggccttccctgcaccctcctgccaccaccctcctcagccttaggaggtgacagcagtgcctggaaaggggcttgctcagaaggaaaaggctcggtctgcctacctgggtcgggaagtggtagatgggattgtcctcagggccccagccagcatgaagcctctctgatgcttcttatagccctcagtgtgttcctatcactccagagaacctcccacatgcatttgtctcccagtccagcaaattaaaatctgaaaggaaggaagaggtcacaggctcagagcctggacactagaggtttctcactgagtgaactttggaaggcttggaaggctggagtttggggtcgcagagaagtcagcctccgccatcccctctcaaacttgggcagggggagaccccagaagcttgacatggccagggccaatagcggttactccctttccctcctacccccatttccctcatcacagtcctttttacccctcctgggatatcttccatcccagttcccctcgattgctttagggtgtggggcaatgacagcgaatactcatgaggggcaacaacttcagacaaaatctctgaagactcacccgtgtctccacacttcttccaccccttgctagctgtgtaaagttaaccactgtgactctcagtttcctcgtctgccaaacggagtaaataatagtgcctttctaggatggatgccaatgttgtttggattcaacataaagcagatgcagagggtgtaacgcggtgcctgatacatgaaagttaagcatgagctcttgggtttttgtttcccaggtttcttctctcttggtggctctttaatgaatagtgacagtccatacccaggcagccatagccactgccactgccacagccaaagctcaggctatgtgatgaacctgttttctctgccttctgcccctgctcccagccatcccggcagaggtgcccactcaggcctcctaccggagcccctctcccaccgcttgaatgcagaggcgtttcttctgctgacagcctgaagacaggccatttttcttctcctcccatataatggcctttactctcctaccactccaccccctttcccagccttaatgactttaacatacacacagttatttaaaaaaaaaaaaaaaaatacaagcccccagtgagctgctctaaaccgcctgttgtggaggaggaacaacccaagcacatgttcacaagtcactgcatgtgatgacagggggccttgtgctaatttcctcgtgtttgaagccccagggtgggggcggggcaggaggcagccagaggggagagacccagggcttgggtatttgcttgttccctttgatcctcctagaaaatgctgtagcatttggggaagtatttcatcctgggaaatctcaaagaagagtaagaaagatgccttaggcaggggttggggggtggcaggggatactgtagaaggaagatgctaccagatgaccttttctctccttgagattctgaatccctgctctggcttccctgggcagcaggagagagtacagaatctccaaggggaggcttcagctcaaggtatttatggatttgctgaagcctcctaccctaacactcacacagtttttgccttccagtttctctttgtggcttatctgagagaggctaatagagcctccagggccctcatctgccccaccctgtggatagcatctaggttgagcctctccctctgatcttgacctctagggctgacgtgtagtctgtgaaccaagggttggtctggtgggggagaaggggagtgagtgctgcctgcctcttggcagaccattatgccaggagggaggaggttcctgaccacaggacaggtccggcagaagggagggaggacaaagagccaaaagccccggctgcacctcctagcagggaaatggagctggctgtgagccaggttttcctctaaatcagaagcaaatgcaccaaagctgcaaccttaccccttgaccgaggacgggaaagtgcctgtctgacctcacgttattggtgctattatcatcattattggtaatatcaccatcatcatcctgtaatttaccagcttcaatggcgaggatgcttaggcttcctctgggctttcatgttaagagaaaatgagttgtggcagcctccccgcctctctcctccccataaccacccacagggcctctgcccctgtcctcatcaccagagactctccgtagcccaggcccagcgtgctgtcatgcttgtggggatgctgtgtgtcagggcttacatgctagggcaagggggaaggcccctttgtgtggtagcacatgtccctcctctttaaaccaagaaaaagacttcaacccacaccctaaactagttgttctcaaacttaagcttgcatccgaatcacctgcagagcttattaaaatacagatcactgggtcccacgcccagcatttctgatttaatggatctgagatggagcctgagaatttgtattttccaaatgctgattttgtaagtttccagttgatgttgatgctattgatctgagtaccacattttgcaaaccactcccctaagggtgagttattggaactcttcttctcctcgcatcctcctggatacaggtgtttacattgtccctcattcgataccttccaaattgggttcccaacaaggaggccaagggcccaggtgcagtgtgagatgggggagtgctgctagctcgcacacataggaaccccttggagagaaggcagaggcaggcaacacccccgcccctacccctgaagatttattctttcatttggtattttaggccttcctcaagggggtgctggggccagcctgactcactgtgtaaacctttttcaggaacactgggctgcagccaagctctcctccctcagttaggcccaccctcattcttccccacctgttcctctagctgagcttcaggctcagcagaaagtgacaatgtccctgtgcacactgtccccatgccctgtagggaacaggcacctggctgcacattgtgtacattaattttcaaagcaaggcttctcataactctttgccatagctttctcctcccctctactccaaagagctcaggaattccacaaaaacagtgccatgggagcgtgacctttgctctttttttttctcctctcggtaggataaagaggaaagaaggtaggaatggacacttattatgctcctatagaatggcagaggctgtgctaaatgcattgcacatcatcttctattaccaggagtgttttctgcctaatgtttgttcaagtcctcagggtaaggcccctgttttgcagtaagaggtttgaaatctccaggtgcacactgtacacagataaccagagacgggcaaagtctagcccagtgattctcagacttgagagtgcatcagaatcacctgactgcttgttaaaacgcaaattgctgggtcccacccccagagtttctgattcattagcactgggctggggcaggccccaagaatttgcattgctaacaagttcttaggtggggcagatgctgctgctctggggaccacggttgagaaccacttatctagttctacagcccattggttagacttttgctggctgttgttttatgtttcactcatcagaactgtattcccacctctagaccagattatactctttctgcgatcccttgaggtcactaaggaaaaatgtgaccagcttgctaattccatgttgtttattcatttattcaaaagataataatcattatagtaaacactcatttagtgctaagtgccactgtcctagagctttgcatgtattaactcttttaatcctcataaataatcctgaggtatctgtaattattatccccatttacaaatgaagcaacagagacacagagatttgaaggttacacagctgatcagaggtggagtagggattcaaaccaggcagtctagttccagaatttgttttgctaatcagtcctctgcttggtgagtatctgttttgagataggcactatgctggactctgaatgcatcaggtaggaaaaatacaaaaaggtgaataagtcacagcctttcctttaacaattaacagtgtttaacagttacagcctttccttgtatgaacaattggaacatcatagaatagtaccaagacagaaatatgtatccagtgctgaggccctaaagcaggcagaatgaataggtctgggagagtcggcaaagccatcaaagaaaagtgtgcatggagcttggtttgtaatgcaaggagttttgagctgtgaaagaggcaaaaggccattccctagcagcagccaaagcagtctgtgcaaaggcaccggcaccgtggtgaactgggcacagcaggttcaggggactatgagtggttcagtgctagaggatcccaggactcaaggaggaagggagtagggcaaaaagggaaagcagctgacaggcaggctagggctacactgtcagtgctcaagagtttggactttggttatcaaggggaaaccctttaaggtctttggagcaagtgagggacgtaatcagatgtgtcattttgaaagataatgccaggttttagcttttagttcagcatgggctacatgaacagacacagtaggagctggccttcccttgcatcctcagtcacttatatgtccctgggtaaaatcaccctctttccctggcactttctatctacctggacagcatccccttactgtctgtttctcactgtgggactttttcttgttgatattttccattcttctccaggcttttccaacctgtacctacctaactctgaccctgtaattcattaattttgcatcttattcttcatgaccccaagaaaaaatctgtagcaatgttgtttgtagcctggaaacccatgcttaagttggccatggctccttgctctggtaggtaagggcagatgtggatacaggcataatttgaggagtaaagaaggggtgacagcctcttcttacccatgcccgtggaaatgaaatgaatgagtctagagttagttgcaggccactgggacccctctgcagggcttacctgtctaacccagctcttgtcatctcactggaaaggctgatgggaaccagtgctagaagcaccatcctgggacctttattttttcatctgtgaagtggcaacaattccttacttgtttatttcacagttattgtgaccttaactcaaacctgactttgaaagcctattataaactgtaaagcaccagacaactatgagagagaaggagggtacgtaaggctggttggttccaacagaaacagaattgagccatccatcaattcacttcagacaaaaccccaagataccacacaatgggaagccggcccgtgtccaaccctataaccatcctagtgagtccctaggcatcttttaactatggtttgaaccagcctgtcttctttctctggctatcaggttttctgaggcactctcttaggaagactgccattctccagcctgacctctgccaaccagggcctcaggttgttgctccctggggctatggatgacctttccagatttccagcccattcccctggggagcagtgattcctgttgtggagacagctggccccaggactccagctcagacttctcaacaaaggactggtccaagaagaagaacatagttccaatcagactgcctagactgtcacaggacacaggcaaagtttggtctcctttaccctaagagaatcctttggaggccattttacattcttcctcttcctccaggccaggtagcctctatctcttcttactttaatgctggagcctttgtgtccatgttcagaggatgtgccagccctggagggatacagtgggggaacaagaagagacctcccctggaaaggaaggactcttgcccagtgactggctgtattccatactggagtccacagttcactgtctggtgctcagctgggatgagtggacccagttggaatgtaggaagactcacgctttgttcttatcacatccctgccctctccccctccaccctttagccttctttctcatcctcccttagtggagctcctgagtgctcttcaggtacagggtctccaggtgttccggttcactcatcatataccttctcccccaaagattcctgcaggatcagccagtctgctcactgctgttgagttctgttttctaaggggtacaggagctcccacgagccactagtgtgcaaagtcctaacaacagctggctcccacctgtcccagctcccccagaggcagcaaatggccagggctggacagagttcccagcaccagggaggtatcagatcagcaggggccaaatccgatttcccttgcattccagaggcattgagggagaccaggaaacaccagctcatttcctcggggaatttctcttgtatccaccactgttgtcactttgcagtcgtgaacttgaggatatacaggtggggggaacacatgaggaggagagaaggcctaagggctagtgtggagcagggagtgcattgtggggtttgagtttcagaactgaaagcagagaaactgggctgagccttgagcagaagtgcctggtgacccctgtggccctggtgcatggaccagcctattgggggcatgggagctcctccggcttcccactctgatggcttaggtcagcagccttcacctgcctcttctgcccttcccagtctcctcccctcagtttgtcttcttcccctccctgcacacctccagcctgcctcctccatatggtctccacatctggctgatgaccatccagagagtttgacaatgccttcttccctccctccacagcccttacctcctcccacccccacccgcggcgtctccttatgactctgccttctgtgttcctccttccctcccccaggcgcctctgcaagaatagaacaagcaggcaggctttccaaagagttagcccttctctctccagcccccaaccccacacacaaccattggctgccaggccatagcaagtccccactcctctcttttccatactcaaagcccctcaccgacaggagctgaggtctgccagtgggcaggacccctccatgaccaggcaagtggcctagacacatttgcaaaaaccagtcacgtcatgactcagagattctacctctgatccaaatacccttctcagaggggacttggcacaagggagaaaacccacatattccaccaacttctcttcttttcaaagcgctatctcagcgggctcctaattctgtctccagcatatgtgcttctgtgtgagtgggggtgcgcacatgcaccacatctcagcatcctggtacccgcatggcattcccaggaggggcagaggaaatgaaagtcgagcaagcagcagcagatgttgctggagttcttcttcctggcttggtgctgctcatccttctgcaggtcagactggtaatgagaggattaattttagttctcctccttcttggccccaatatggctggccaatgctagttcagctggtaacattttcattggcaaatcctccactcacccttgagacaggctcagcatgcacagccccagaactagatctgctgggaacagaagccttggcccttattcttggacagatatgacagcttggtagcaaagaactgatcctttgtccccttgctggtagactggaaagaacgctgggctggactgcaggtgaatcctgcttggccgtgtgctagctgtgtgattctgagaacttcacttagattctctgagctccgattttctcagttcttaatgaacataataacatgggatgcacagggcttgttgcaaggattaaataagataatatattcatatatagtaagcactcagcaaatgctagattaagtctgaaatctaaacggggctcatagtgcagggaaatagaactgcagactttttaagagaccttcaaaggctcactaatccaacatcctcgatatggcagtaaaggcattaatactagtggccgtaatactagtaaacacacataatgttttctgtgccatctactgttccaagtactttatttgtatatattaactcttaatcttgcaccgacaggatttgaaataaggaaattttacaaatgagggcatttggcttatagaggctgagagccctgctcttgttagtggtaaagccaggagtccaatctagcaatactggttgtagattttgctcttaatcactacccaacactgcctctcagatatgccagtgaggcagctccagcctagagggcagtaacttgctcacagtcacctcgctgttaatcttctccctctcaggcctgggctctttctgtgatgttgaactgattagtcatattcattgggagctgctagaaggacccatcttctgcagccagccagccgtccccagagtatcccagttacccctttcttctctaatgctgcccaaaagtgtcccctgaacacaaaaaaacagctttgtgcaggctcctgcagggactcccaggtaaggcctgagcactctcagccctcccttctgccaagatggatagtaccatccaaggacatgatgagatcagctccctcagccctccagaatctgttataaagagaaagcagcttccttgggatagttgccacccaagaactcagaagccaagctttccagcggtgagataagtgtcagggcatgtgctcggctcagcctgcccagagctgaggtcagacccttgtgacccccaggtgtcatctgcggatgggggcagtgctgtgggcacaactagcaggcagaggagatggaagaggagggggcagcggtaacttggaagtacttaggagttgtttttaaaagcaatgtcaaagtagagagctagaaattgaaggaagaacagaacacactttttacaaagcaaagtccagggatccctggtctttcacaatatgaccccaccaacctttccaattccacagtacttcctccaacccaaaacattacctctgcaaataacagagccccaaacagtggttttcacataggtctgcaaacaatatgtgcatctttcctttggagccactcttcaggctgctgttacgttggtgcaaaagtctttgtggtttttgcctgttttccccccagctctctattttgacactgctttgtgcttatctcactgcacaacattggtgcagaagtaattgcgggttttgccttttttttttttatggcaaaacccacaattacttctgcaccaatgtaataactgctaagatgtactgagcacctactatgtgccccaggcactatgcatcatatgcattttcttaaattaattctcaccacataatcctattagggtaagagctattattatcatcttaaaaaaaacttcctttttatacagggtctcactgtcactcaggctggcatgcagtgatgcaatcatggctcactgcagcctggatctcgtgggctcaagcgatcctctcacctcagcttcccaagtagctgggactacaggcgcatgccacatcatgcctggctaattttaaaaatttatttatcgcagaaacagggtctcactctgttacccagactggtgtcaaactcctggcctcaagccatcctcccgccttggcctcccaaagcattgggatgaggcatgaaggtgttgggatgaggcatgagccatcttgctaggcctattaccaacatttaatagttaaagagatcagaggttagcgagcaggttaggtaacttaggcaagtttcttaaactcctagtgcccccattttccttctgctacaatgggggactaactcagaatttattttgaggattaaatgtattttgagaattaaatgatagagtacatatcaaacctttaaaatgtatctgggctgtagtaagcatttagtaaaagttaactgttattattatcattactgcattcaccatctcctctgactgaaagtaccccagcccttccccagcatgctcaaatctcactagtccttcaggttcaagctgtgacagtgccaacatggcaccctgcactaccaccacactgctcttctttgataaggacaacttgcctcttcccaagtttatcaaatgctaaggaagcttacctacttacctttaatctatgtcccctggttcagattggagcccatcatgagatgttaccactcgttacagcctgcattgggaataataccccctccaggaagtcttccttcctcagcctccactgatatccctgaattcctgcaagaccatcctctataatattcagcatttgctcactggcattacttcttgttatttttcttcctctgtcttgctctctgcactggattgtaggattcttgagagcaaggactatattttattttattttattttatttattttatttctgtttatactgccaggatatttatcactccggaggcacttaaaacacttgttggttcatgcatcaaccaataatggttaattgttcattaaaaacaatgtagattatagggtaaaaggcaatttttgacagtacttattcctacttcaaaggccagaataacactggggtcatgaaatcataccatgaaacctattgggctttgatcacatcggattcattccattttcttgtgcttggttgaactagccccttatgaacatgcccacagacagctcttgcctgctagccagcctcatgccccggctctggcaggcatccagccccacagggcctcctgctcccctgcctctgtgggtggctgtgcctctcctcctggccgtggttcagatccacccgcccctgcttccccctgcctgtcaatcaccagtctctggagatggtccccaaggcccatgctagttctccccagcctccagtcacaaatgactgcttcaaggcaggctggtctttgtttaatgcttctttcatttgactttgggctaagaggaagataaatgacactctgtctctttaaggtaaaatagaggcattaaaaatggcctatttttttgccttttaagaaaaaaaatcctccaagttattagcggaaagaaaatcatttgacttaagcagcctctggcagtctggtgatgctgagaacaatatacctatcagcatctatcaggtttggaaaacaaagccatctgcatatggggaaatgaaggggggctgaggactgagaagaggtggtgaatatctaatgagggatgcacagagcaccccacgcctagctgggaaagttcttggaggtcctggtgtctgtggttgtcagtgactagaaaagtctagacatttaggaagggagcattaagtttggactttgaaactttttcttaatagtcaatacagattttagagttcatccaatctaagtcatcttttttttttttcattttataaactcaagactgtagaagataagtgatttgcccaaggctatacttgatttgcaccataatcggggctagaatccaggttccctggctttctcagattggttatcttgtctgctgatagaagccccttttctcacctgttgaagatgctgtctcttttcttctgccccaatctttcttccactccagaatctctccctgtggaccccagtgtgactttcccatccaagtcttctgatttcctggtgctccagccctttgtccacttgcccaccaggcataccttctaggacaggggctctgtttattcccaaacagggccacgtacacccaaaatagacttttgggtgcagcagtaatttgccctggggctaggtcccagcaacatcaagtctgccatggaagacagagaaatattcatgacgagttaaagttatgcccacagacaaggctgatggtccagacttgctgatcatgtgtgacccgtccgaactctccctgtgtcttgtcatcactccgttaatctgcacttgtttatcggtttttgaatgtgtgtcctgtctgcatctacaacgtgtgcctgtcacctcctgcctgcccttgactcccaaaggtcagcctcagagcctctttttcccttgagctctctctggggcacacagaggagctcagtgcagggaggagtctgcctttaccccagcccagctgttccatgttcaataacttggtctgagagcatccacaggccagagtgaggacaatcaagaccctctctagggagttcatgaaaaagagtgcaagccgggtggatgatcagcttggccttatagaaaaccatcgaagggcagggtatcttttgaaatgaatatgggggtggagttgagagtccgtgatcctggagaagcctggtattctgactcccagaggtcctgcttcttgtgcctgctgagaagtcctgtttctctggcctcatgtcctggttgagattgggtctcactgggatagcatgacctggccacagatggctcattagaactgtgttgagccatcagtctctcaggagcactacctgtcattctaaaaaaaaaaaaaaaaaaaaaaaaaaaccccgcatactctttgtcttctttttgtctttattttcccttttagagactccctagtctctgagggcctgctgaaagcagcagatagaacatttgaggcagacacctgagtttatatcccaggctagctgtatgccttgagcaatgcacttaagctctctgagcctatttgttcttctgcaaagtgggggcaatagactccccctcatggcattattatacaaattgaataagagatggaatatcattcatttattcagtaaatatttcctgagcacctcctatgtgttggtcaccctcctagatgttaggaatacatcagtgaacaaaacagatcagcacctgttgcattctagtgccctgttttaaattggaatgtgtgtattttaactgaaatctgagggaaggtattgctacatcctcatagtccattcctcttctctggacagaatacctctactcgctatccagatgtggctatatatgaagaggggaaaagagagggagacaaatatgaacatttaaggagaaccacttctcctaaattacaccttttagttctcaccaatggtgtaggtatcgctgtccctactttccacataagtagatgaaagccctagaagcttgcggaacttgcccaaggtttcacagcccatgagtagcaaaaccaggatttgaaccacagtcttctgactctaaagacctgcctttgggttccatcaagctgctgcatatagcacattcactttgtcacccatctcagtattaataactctgggaccccaagccagagagcaattctgtaatggatttgtgttgggtggggtgaggagtggcaaatggggggtcagcatgcaggtgcttgtgtttgtgtctgctgagtctgtgtatgtgtgtggggtttcaacgacagggatctcagtagggaattggtatttgggctgctaaataaccacaatttgtattaagcagaaacatagtcattatgcaccacgtgcgggctgctgctgctcactcccattagggaagagcgcagctgatggcactttggcctgtggtcttgtgaaaagcttccaccaggggtcctgagatggccttctggggacaggatattgggaggaggtggtaggggagtaagaagagcagggcgctagggcatatggacctcaatttcaggagacgtgctccttgcctcctacctctatgggcctctcatcagtaaggccattctggttctcattaacgcaagtaaatacgcatcccagcactgggcaggggacacgtgttgatatttaattatatagtgtgcactgagcatattatggctcctccagggaatggcagctgcagacaatgaggtgcaatggagtacattcaaaactacttagttaattaatgcattagcggcccactttgctgtgaggggggtgtgggagagagggcagagattttcctggtgttcttttctcccttcctgttcctctcttcctctcagccttttcttccagaaaatataaaatcgccatagtcaggggagtcctcattaggagctgtggtccaagatttactgagagaataaggttaaaattcagcactgagataagtgaagcttggaaatcatacatggatttcctttgcctagttgatgcttatccccagcaacctagagaggctggcagtcagcaaactgacattccaacgtagccccaagctctgctctctattttgggaactccctctctcattcagtagccccaggtgcagactcaggtgcggagttgcagcaacacacagaattccattgtgctgagagcttcatggtttggagtgaggaggaaggagtgctatgcctaagccaggtgaagtgtgaggaaccgaaaccagaggtttagaatccatctatttacaaagagacccttccttctaggtttctttcaatatgtgttccccctctcctcccactccacatggcacctttaattcttacatcaatgcatgaagttctcattctgtgttctttgcggttttcattgttataaactttgtacatttgttgattttcctttcctcaccctggaacccatggactttatctctcattcttttgaactcagaggcattttccaaactgctccatgtgcatttgtcattaagcctcttagttacctgtattgctccctctcaaaacaagctgctaaggtcaaagactagatcatactcagcattctgtgcatagcaccatactttgcacaggaggcattcaagctgtatttgaatgccttccttattggatcttcaggaagtacctgcaggtcaatgatcatgtctttttgtcttttgggatccctgctgccagctcagtgggctgagcctgctgagggttccagcaatgcagaccagttggctgccttaggtccaagccagcctaacatctgctcttaggacagtcacctaagccagaaatctctcggagagaaggtgtgttgtagcaaatctgtgactgggaatggaactcccatcactagttgctgatgttatcgagatttttttccctttttcaaaatctcactattgtggttgattcctttctgtgttgtgtttaatgtgagaaacataatctgcccttatgatttctttgtaaaggtggggtggtggggaaggaggggttcccttttcagagttctctctccttggaccattagagatgaggcctacgcatgggaagtaactctcagttcatcggtatggaagaaagagccctcagctgtagcaggaagtcaaaccttagtggggacctttctgagcaggagggaggagtacagtaagcactgaatcagcttgccaatgggagttgtagaacatttgttctctctgatcaaaaaatgagacccagatgtcctggcccacgtgggagaggatgaagtcaccggaggcttgaggccgctctcagtcctggaactctgtagttctgaggtgaggcagggacgccactgctcaagctgccttctggtcctgagggagtggagaccagggaccccaagaccagcttagggttggaccagccccagaccacataggggtagctgggcttgcggggttttaagacagatgaagttgaaagaggctattgacgaaagctgccccgttgttgttttcctaatgggagggttaaggcgaacaaaatcgtggagagaatggaggatacaggaagagccctagagaggacatcagaaagcccttactgaagtccacgctgccacttcctagatgtgtgactttgggcaagtctcataaactctcagagccttgtttccccaaatataaaaccggggtagtaatcctcacctcacaggcatgctgtgagggtgcaatgaggtattctatgtagaaacactcagacacagtacaaacattctctaaacacagggtactattatttcctcccatctgagacttacttccttttcctgggtaagagaacataagctataagatgaatgagggcttgggtgcacccaccagagatctgctggcatgccaaggatgcccaagctccaggctgagaaggagggaggccaggtgactgccatggtcctcatttgctacatggctccccaggccttagaaaagaggcaacattaatccctccatctccacaggcctttgccaatcattgcggcaaattcaaatagggggcacaagagaagcggagggtccagcagctttggttccgtccctgacttcccgcctcagaggcctctcatcactgtaattcccctggcaaggcccccacctaagcctctttgctaacagagtatttttaacctgccacctccttgcagctttgccgatctgcagacaagggtcccggcgagataagagaatccgttagtgccgctagagtcaggcagcgcctgctaagtacttcctcaggagctccctcctctgcccccagggagccgctgccggactgatgcccagggatctgaaggcgaggagggctgggtttggcacctgcatgaagggagctccagcttcttcactcagcccagcctctaaaacagagtttgttttctctatcttaggtgttttcaaagatggtccctgccctggctttttaaggagccaaattattccacttctaagggtatcagatactttcatcttcccttttccctccaaattctgtggggatttggaaagaaagtatttcttagaaggtgtctggaactggccctcaatggaagacaccaccaaaaagcaactggtactaaacctccctatgagagggaagggaaggaaggctcacctctgctcttaccttttgcattagggcatgcggagcaaagaactgcagagtcctgaacagggttcagggagtaggggcagagctcttgtttctcctcttccgcctcctcaggtagatgttggtggtgaatggagcagaagagggttttggggaacaaaaaagaggcagaggtggattgggctgggaggggcttgcccaggaaggggaatcacagaagtcttcccctgtagcctgcagggctaaaggtgtcccctaaccaaatgctctctaatggggcacacacatgccagccccttcctgctaaggtcaatttccatgctaaattgttcattattgccatgcggcaacactgtgtggaagcgtcagaacccacaagtgtgggcagagtggacaggtgaacacatgaatacatctgccttcctgtgctccatggggggaagcggcccctttgtgggggtggtgatgagaagccccccacatgctgacatccaagagtgggagaagggcatctggcccagaggcagagatcatcaattcatttagcaagaatttatggagcatcgacttgccaggcactgtgttcagcactggggacaccgaactcaacaaaacaaaggatggttgggagaaaggacaccagcaagttgttgcacaaataactgcttattacatggctggccagtgttgtagagatgtccaaagttcaataagcagcatgggaacctgtaactagggaaccagaactactgggagaaaagggatcaggaaaagcttcctggggaagcaatatttaagctgaattgtaaatgctttgtcagcctctctgtctcatccctaatatgcacagtttagagctccctaccccatgccccttggggccacccatccacatttcccaccagccatcccaggcaaaggtgagctctctaactcccatactgctccctctctctcatttcccacattgagtttgctgccaaatcttgtctgttcatcttttccctcacctgccctcctttccacctccctcccccagcccaggctgagacttttattatctattcttgaacttgtgctggctcctgccctgccttctctaagttagctttcacattttttatatcatttaatggctctccgcagcttgtaggtagggtatagctgagtctcttgagcaaggtcttggcatccctccaccagaaacagtttatccctccctacatcccttccccatgccacttctgccacactcacaccctgttcttccagctttgccaatccctccctcttccctaagtgcccctgtgccttggctcaagggtcagtccatgcctatgtcttgactcaagctgtccctgccatgcctccctctctctgcctgatgaagtgccctgtcctttcaggtttaagttatatcacacctcctcagtgaagccttcctgatttgcccctctataatcccacatttcttatcattggttacagcacttagcagagtcagccttgtatgtgagttgcttgtatttctttgttagaggcagtgtgcacagtggtgaatgtcacagactttggagtgggattatttgagctcaaaacctggctctgttcttactaggagtatgactttgggcaagctacttaacctctcaatgccttactttcttcatcaggcatacagagataataacaggacctacctcatagagctattgtaggcatttaatgtcttcatacaggtaaagcacacggaacagtacctgtttgttattatgtttatttcatagtttatctgccttccttgcctgattgtgaactcctggagatcaagaagcatgcaggattcatctttgtactcccctaaaaagattctgcttctccccatagtctcctcaaagaaagaagcacaaagggccaaagctagaaaggacctcagggctcaccttgagtaaatgctaattttatatatcagtcaactgaggcccaataaactgaaggacttgcccaaatcacacagctagaaacagctctggaaacctagcagtcaggaatgtaatacccaggtctagctcacatctctcctgctccaatacaaatgctatttctacctcctctttggagaagaacagatggtcagtgtcatctccagtcttcccttggcatatcactgagtcacattttccaatcaccctcagccttctgcccttcctgctaatggatgtcagctgtcctgagccctttggcctttcctaatgaggcaggtttttctaccttcccatcagggtgctgtgcttctacacagggtgctgcgtgttctttaaatagagagctctaaggagctacaagcaggatttacgcttggcctcaatggagactccagggcgaagaaggggagagatcaagttgaggcacacacaggctggctcctgctccccctctcctcccagcacctaccctgccaggcacccaggccacattcagactcctccttttactgtggattcaatacaatctggaaaatgcattaaacatgacacagagtagttgacgcgtaattaataaagtacagattttggctggaagcctcaacttaaaatagcaccatgactgtggagaaaaagggagggcaggggagagaggctggagatgaatgtgatgagaaccaagaccgttatctctgagagtaacaggaccacttctccctccaaagcaccctgaaattagggaggagaaagataacaatttttttattattattaatgggatgaagctgaggctcagagaggctaaatgtcctgcccaaggacactcgtgcaccataggacagagccttggccactcgtccgtgccctcaggtggtcagagtccaccatttgcgtattagtaatctactctctcgtgaagttgcacatttcaggactgtttttaatttgagagatgttttaatggcattttgagacagactgttccctagctgattctccagagaggctggagggagcttcatattttctttgaagaagcaaaaaataaaataaagccttttcttctgcaagcacattcagagagccctttgctgcagttcaccagccttctggtgtgaggggagaggtgagaaggggattgaggaaggagagggagagggtagaaaaggcttctgtggttcattcaaatgcctgggcctcaggggcattctctattgaagctggatccctgctgctttctgccagagattccagactggttttctgaagcaaaatgtaaatttcagcccaactaatcaaccctgataaggcaacatcacctccagcctgccagtcattaacaaaggatccaaggcagacctgggcgactaggagcagcagctctgggtggaggaggctgagatggaatattctgaaaactccagaagcaaatcaccagaaagcagaattttgataacaaaggggaaactgaggcaggaaatcctgatgtgattccctcatgccacttgcagtaattccttcctgtctctacaaggtagaaatgaacttgatctttttaaaatagcagtggagagatggggacgtgtaaaagtctattatagtacaaggcccagtgggccctctctgagaataattaatctatgaattatgtgacataggaaaacagcactggtttctgtggcatgatctgtgttgcatttgtttctgtgccccagagcatgaatgctatccttagcacatagcaggtcctcaaaaatgtttatggcaagattcaggagaccaaaaccaaatctgtgctctaaacctctcagagccttggtatatctgtctgcagattggggataaagtaggcttgtctttcttccagcctgttgggcagattgaatgagatgacgttcctgtgtggaagccacgcaacaatgagatgctgttgagtatcagatatctggctgccgtgttctacctagttctgtgttcctccctcccatgcctgggtcagggccagctagactgatctggcaatcagagggacacaaggagtttctcctccaccccgtggctccccttataagcacactgttctcaaatacccagaacttgaacccagaaccttatacagctactcttcccagggggaaatagttcagagctccagagccagaggcccagctgtcaactaaattccccgcaataaccctttctacttctgggcggggggggttgtactaatgaagggaagaagggacagagaaaaaacatgctatctatctctggtagcagaaggagtgagggaggctctggtgggagagacgggttgggtttcactggcattccatagcaggccttccgagtgcagctgaatcagagctgagggagctgccgagaccagaggagccttacagtcgactgtgggcaaacctgatagcccatctggaatccatccatggcctggctccctcccccatgtcctgagctcactgcagaagccatggtggaggagcagggccaggcacctcaaccagcaggctgtaaaatcccccaagtgccagcccaccagcccctgctgtccctccctggctctggaagcacaggttcaccctcccactcaccagcccctggcttcagttcctgccccttcctctctgagaaccagagtgaataatcttacggctttgagtagtacagagatggcgaagcagcatcagagatccggccctcctgaggttatttagagggcctgagaatgccagctccagtccatgtcagcaagaattgcaagtgggcgtcacggtagcaccagactttcagatcttcacagaggagttgaccagcccttggctgtcagagtcctaaatccccttggatggctggtgtccccagtctcctctgactccaacatcctaaatgcccagactctcaagacagaaagagcacgagctggaggacgtgggattgtgcaaagagcaggggcagccgtcttcctggagcctggtactttagcataggctccccagctgtttgcttggtgattttgagggagttgtgtgctttcaccaggactcagttcctcttctatgggaaggtacttccccccacaggatgatcatgaagatcaaaaaagaaaaattaggtgatagaaacaaacaaaatgtcattaccttcagcataccctcagcctagcagatgataatgcagtgcctgttagatggacaaaggacaacattggctgggagaatcaatgcccagctctgaggagccctccccagagcctctagggaaggggtttccccattttcctggcatttctcccactccctaggttgattggagtcatggtggttttgttgtcacctgccatatttcagtaacctttgaccatcgcccagctagcctgtgggggtagatgcctatgcggctctccctccctctcccatgcagagaagcacagtcctccctgggagcaggaaggaatgtgcttcctgggaatactccttgccccatgtgctggagatagagcccactgcagggctccaccacagggaggatcttgaaagccaagaaaagcgacccatttgttggagaacccgacagggtcagaggcagctcagaccacctgtagggaatcaggcccttttgcccaccacaaatctcttttaacaacaaactttgagaacagcctgttttcccagcgcagcttcctgcatagtgtttgcctaatctttctgtccaaaatccctctccaaacaggaggtttcctgcccagcactggcaatcagagagctaattatgtgggattagagatggagttggggggtgttccttttaattacaggaaaaaattagtccaactgatgtcggcaaggccactgggattagaatgaaagtccaggtttgggcacaggtcagtttgggaggtggtagagcccccatgctctggggctggtgtcttctgcccttaactgcctctggagtctggggcagacagggggaaatgcaggtctctgaggagcttctcttttgggaatcttggagaggtcatgtgtatgtatgagagaggagacagacacagggagaaagaagtagagacagcacagagaaagaaacaatgtatatggagagatctggggattgatgggagagagacaaggaagggaaggagaaagagagacgcaggtgggtgttaagaggagattttgagtaaaaacagacagagggacacaggtttagagaccaccatttctctccccacactcactgtggactagtatttatgtgactgtctctttcaacggggaagaagagaaaggcatcagaagctgtacctaggcttctgtcctccctccttcctaccttccttctttcccacttcccactctctttcccctggtgtccagcacactggcctggtttcacagcacacggtgccagtgaggaatgctttggcctggctggggacaaggatggcgtggaaagcttggactccgctgggctcctagtgatcttgagtctcctctgtggcctgaagatggggctttctgccaaacagtcttgccttctctcctatgagaagaatctcttggccagaaaagcattcattcattaatttattcattcattcttccattttacaaataattacagagctttattatgggccagacccataggagtttctcctccacccccgtggctctccttacaagcacactgttctcaaatacccagaacttgaacccggaaccttacacagctactcttcccaggagtctatgaatttttattagtgcagtggaatacaaatcaaccactggctttccattttgagtggtatctccccacctcacccctgtcatccagcccctcacttacaacatcctgagagtagcccagaccctcactcagaaacatccactggccaactcttccttaaagaggcaaatgatataagcacagagtaaaaagacctgagaatattttgaggcaatgtacaacaggtacagattcatagggtacaaagaaaagacctgagcataattatttgtgtgtattcatatctcacttctttccaaagaaggaattaagatgacttacaataaaagatttggccaacatggaatgataactgtcttagaactagaaaagccaagccataaagggagtagaaacacatatgttaccaagaaggtcaacataggcaccaggatccagcatgagatttggcctgagtgtcccagcagccaagtcataaagggaaatgaaatgagcaagaaatctttacactttgagagaaggcagtgtccctacttttcaggacatttcccagacattacattctgtaaattatttatcatgtgagacctgtacagacaccaggacaagagtttgacatccaaatcagatgcttcttttatatggcaatttcttgtattagctcctgacaaagtgccaaggctgtgacttccatgcaacaagcagcattcgatgtgttattcttatggagtaacaaatgctgaaaaataagtatatgaggctgtgagggaaaaggaagcttgctggtttggcttttgtggtccaagtttacggctttctggagctctcacttgattcaagtatagaatgcaatttttaagcaccctgtcatgcttggcactctgctaaaagttgaataaaatgaactatatagattcaacttctacatctgggaatttataatttatgttggcacttagatgaggctcagacagcagaataagagcattaaaatgacagacagtaagatgttaacattatacacaagacaaaggtgagtgtattttagggaagtaaatggattaataaaagattttataatcaaactgactcgtttgcatgcctttctactactggctggctgtgtggcctaaggcagtcacttaacctctctgagcctcagtttcttcatcagtgaaatgggttttgggtttcatcagtgaaatgggttttgtaaatgatttgcatgtaaatcatttacataagatgcctggcgtcatgtccaattcgtagcatgtgctcaatagtatagctatgctcacattctaggattgttaaatagggatgagttcctagtggggtgagaggagcaagagtcttccgatccactccagggaagctgaagactcattacttctttcgatgaatgcccccaaagccgttcgcttcctaatagtcaggatgtctaaagctgaactggaaatattccaacataggtcatctcaggaacccgagaaacctctccctttgatctgtttatatcacaacttgactgggaaatccataaccctcctttctttcaccctgctttccccacttaggaaatgcccaggacttggattttgctgccccagggtcattatttaggccatcctccctcaccagccacataggctctcctttccttaagcctcaggtactccttcactgcgcttcatggggaggtcctggtgtcaggcagaatgaagggcattaactcccacatttcctggagggatccctttgtccagattggttgtcagccagccccaggcagcctccaggctatagcaagagggggtgaagatgggaagccatgtgatgctcccctgcacaccccaccacacccctgtgacagctggagcccagcatcccatgagccagagctcagcatcccatgagccagagctgggcagggagggtgggacaagtccagtgcagccgggtgttgggccaggagtcaggtaggccccaggcgggtcctccaggcacatccccttggtcctgccctccccatcctcacctccgcttctttgcagtttctctggtactttccaacttactgccaaattgtcaaaagctatgagaggcaaagtgctgttcagttaatgactccagtccctggagaggtggagcactcttttaagagaaaaaaatcctagaagagtgggggtgtgggaggggcagaatgagggatgctttagtactttacacaaaagccaggctatagctcctttcagcgctttttaaggagcatattagcagtgggtaggtttgccccgagctgccttctctctgtgggtgaaggactggagcctcccccttgcttttctctatttcacaaagtgaaaagggtctgagacagaaggctgccatcccttcggcccagtgactgcggccctctgtgtccccagcaccggtcctgtggagaccctagtcaaacgactcctccttgctctgagagaggctgccttcaaaagcaggctggaacggccactatgcaaggggttcgcgctccatgcacctgctaaccctctgctgcctcccgctcctcctccccgcagtcctgctcccttggaaaggacagaggaggaggtactaatttcccccatgtccccctgaagaatttcctcccagcccaattttcctcctcagtctggtcccacccaagtctatgaatcagagataaatcaatccaaaatccctctttcatgctttcctttccagtttcccaaatgctttcacattccttatctcatttgttcccgccgctgccttgtcatgctggcatgttgtgttaccagttttgtagatgaggaaagtgagaattaactcccttggctgagtgcccctgcgtggcctccaccccagtgagctagacatcagccttcgctggacaatcaatgtctattggaagggaagatggaagtgcagagcttggaagatctagaaaggaaatcaaaaaaaatctatgaagagactgcccaaggcgagacttgtacaatctctcacttccatcgtctcttgctgtgatctgacttggagaggggagaatttttttaaagttatttttgttttgagttggccctagtgtagctcccttggtcttagtccttggtcatccatgcacatcctctgcagccactgccactttttgggtgcgatgatgtggctgtccaggcccaacagcacatgaatcctaggtagtgccaacttctcaggggccaggaggacttggggagtcctaaggagaagaatagaggctgcactttgcctaccgttgagcccactggatattctgagaatgctcagagaaaaggcaggacaaagttccttcctcacagggccaagccctgcttctcttcctcccactctgcggtgagatccgggcacctgctgtactgtacccagcaccagcagagtcttcacgctggcactctgcccagcagctgtggggcgttagcacaaaaagggggtgggcattgaggacaagcaggtgtccagccaaagagaacaaggtgaccggggagggtcttggagcagtgatggcagggagcaaagagagtccatggaagaacaagcagatcgagacaatccttactcaccaccccacccccaccccaccttgattagaatgatctggccccagaagaatagcaatgaattaattaggggcctgttttcatgaagcagctcattattaaagcccctctcctgggaggggagatgggaaaaggtgtgaagatgacagctattcaaacagaatcttttaaaagaggtagaccctcccccagctgtctgttctgcccttgggctctgccaagcagtcaggcagaccagagcacacagggtacccctgggctggctgccggggactgcaagggatggaggctttctggcttgacttcccttccctcccttctcctcttaccctgttcctcagaccccaactctgacctcatcttcgtaacctcaattcttgctttccacctgtctgagccagcaggctttccgcttagtggtcctggagtccttttcatagcagtaccttgagtgtttatactactttcctcctaagagctctcaccagcccactggggagccagaaaagatcatttcgacagaaacaaatgtggataggtgtttacacgccaggttccagaagattccgggtggttgggatggcatggaacaagattccctctttctctactcatttttctctagtgatggaaaaacagaggcctagagaaatgaagacccaagagagttcagatcctggctcttttgcctaccagctttgtgaccttggggaagttacctcaccctactatgcctccgtttcctcatctcagccttagggataatagtagcgcctaccccattaggttgttgtgaggattaaatgagaaaatgtgcataaagcctttagcatgacatcaaacaataataggagttcagtcaatgtgagccatgagtaaagttctactcctgcccagtctcagcaacagggattccttcatgccatcagcctgtgttactgagagcctactgtgtgcagggcagtaccaagtgtagtaaggcatacgaagctgtacaaagcatggtttcttctccaggagcctgaatatcttaggaaagatgactgcatatgtttacaagtaactgtgccaagagacattctaggtgctatgggagttccaaggaaagattggtgcaggcttcgtggagtaggtagcatttggataaggccttgaaggatggttaggatctaggaggtagaataaattgtcaagcaaaggcgtgaagacgaaaaagctggggatgcaattggaaaatggtgagaaggccatgttagctagactcctgaatgacaaactgaggagtatgaactcttctaaattattaaaggggacaattgaaggtggtgtgtgtgtgtgtgtgtgtgtgtgtgtgtgtgtgcgtgtgtgtgtgtgtatgtgtatgcatgaatacatgccatgatttacttttttcattattccaaaagtagtgtatgttcatcataaaaaaattaggagactgagttaagcaagagaaagaaaattaccaacacctgaaatttaaggattttgcatacagaaaaggcaggatcgaacaagtgttttaagaagattaatctggcagtgtttggtagaatagattagaacaagaatatgctggaggcagggagatttctcaggttattgcagtagcccagataagaggcaataaagactcagccccagcgcactagcaatgggaagagagattcgatggcatggttgtaggctccatttctctcggttaccatggcttttctgcaccatggtgggcacatgccacgtgtgtgtgtgtttttaatgacttcttttaaaatctctgggagtctcctgcatttaggcacaagtccagtgtcagataatggtgcttagcgctctcgacctcccttcccatccctacagctggaaatgccgtcctcagtgttaatgaaagcaaagattactgttccagattataaaatgcagggcaatctcaggccgtagaaaagaaaagaatgaattaattaaagagagtaataaccctcttaaacaccccatcctttgctcctttctccagactgcaggtggccttctttgtcacagtggaggagacagctatatgatctattttgttccccaggacttatctccagaggcacccagtgctttttaaatgtagtttttagccctaatgtaggcattgtcctcctgtttaacttagagaaagcacaggctctggagggaggcagaataaaagagttcaggctttggaatcagacagattcagcttcgagtttcactctgccactttctagctgtgtgatcctgcaatagacacttaacatgtctttttctataaaatgagaatgcctacctcagagttttgaagagtattcatgtttatatccctgaatttttgcacacgggttgacatagaatagatgctcaataaatgtgttgaactaaacttataaagagagagaagctattcgaaagcaccatgtatatccagtcccaggaagtgctagtttccttgtcctgcccccttttgaggagtgagacaggcatttccaaggtagttaacctgtcgatatgcctaattccatcagttctcaccacaccctattccagagcttggtgagaaaggctgccctgcactccccacagacctgaaagagtggctctaaatcattccagttcaaaaagcctaagaggttcaattctatcctgaaacaaccagggcatctccaggaaaggaacctgtgtgcagtgccttgaatggagattccgagtgcccacactactagaacttggggtaaacaaaggttcagatttggcagaagttcctcgttattctgtattaattcctcctaccacccctccagctacacacccccaactctgtgtgctccatgtgaattattgctttgcttctgcatgatttgatttcatctgaggctgcttaatgcttcggctgtctccactgtgtttatcttattgtttcccagaacaatcaaatgcttcctccgcccctggcagcttcgtcttgttccctcagcctcctgacctgcccaagcctaaagctggagcagtgtttaaaggtggggttggactaaggcctgagccccgtgttcctgaatcacccagtgtaattcacctctcataagctcttgtcctggcccttggagttcaaaattctccaagagtagaacccagaggtctggattctttttgcttctagctctttgtgtcattctctcatgagtagcaaagggagaggccccagagatggggtgcttggtgcctttgtgagtgtagtttgtcattaactgtaggaaggcatggagcaggggccactcctcttagttctacgagcagcatagaccagtgatggcttggccatcctcatccacccttgtctgatgagggagcagagacgccacaatttagaaacagaaaactggtctccggagatcctcaccagccaatctccccaccctaacccttgaacgctgaccttactcatagtaaatgctcaataaatagtcactacagctactatccttactagccaggctattaattctcatactgtcccaagatgcaaaagtccagagaacaagtgagtcctctggggactcctccctacattccaggagaaagatctccatggcctggccccctgaaatccaggactctctagccccatgcaccccgctgttagctccacccacccctagttgaatatctagggcagactcttaacatggacagaaatagaaataattgtacatggaaatgtcaatctccagtgttaaccgaagattgaccaacaactcattggggaccagtgctggaagcactgtgtgtgtgcatgtgcgtgtgtgtgtaagggtgggagcagcagaaattctcaaagcttagaacatcttaacaacctccttccccttcatggaaaagagagacccttatccctgtttcccttcttcctctcctctgctagctcagtgcaaaccacgggccaagttttccaggctcctgcgtccccgtccaattagccaagcatttagggccaggctcctagctgtcctccagggagcctcagcctgctgagttttgactctgcaagcttagttaatgttttcacagctcagaaggcggggccagcaataggcaccctggactgccaccgctgctgttgctgctgttgaatgcgtatgtgagagagtgtgtgtgtatgtgtatgtgagtgtgtgaatgtatgtacaggatagagggaggaagagtctcagagacagaatttaccaaagacttaaatctataaataattcgggtcatgaagctctacaaaaataatcttcagcttgaatcttctctcgcagcaccaaatgctcaactccagatacactctcattaactcactcccagggtcagcctcagcagcaccaggccctctccacctttcacctccttaaaggtctgaacacacacacacacacaatatacacacaccacacttatacacacaccacacttatacacacatactgcatacacacaccacatacagtgcctatacaccatactcatacaacagacttacacacaccatacatacatacaccacatacaacacataccatactcatacacactcacaacacatatacaccacattcatacacacaacagactcatacacacataccacatatacacacaccacatccatgtacatacaacacatacacaccacactcatgcacacaacagatttacacacaccacacacatacatatcacacatccaacacacatcatatacatacaacagactcatacacacacaacacatacacatcatacacatacacacaacagactcatacacacaccacatatgtacacacaccacacatgccacacacatacacattcacatgccacatatatgttaatagaccacaaaagcatagggtccttaggtgaacagaggtagaagcgagtgataaagtcctcttctgaagtgaatttgaggacgccagatgctgagacctgctgagagtgatgttgagcgctcaataactctgtgtcaaaagtctcatcctctccaaatgcttaggtctgagagaccaagtttctaagaaatctgagctcaggcataacaagaacagctttatatttatattacactgtacgttttccaaagaactcacatttccactcctgcattttggcttaggcctcacctcctccaggaagtaccccctcagggcctccttcaggccaggtgagatgctgctccgccccccgtgctggtctccctgggacccccatgcaaacctcttctcacaaggggtgacccctgtgttcatgaagaccagacaaattgtccatttccccatcaccgggcttcctgaggggatccttatcctttatcacgtatctgcagctcctaacgcaggcctagctcatggtaggcacataataaatcaatattggacagtactgacattcatagctaataactcattttacattcacaatatcttttttgagctaaggaccattatgtcccaccattatgggacagctacagaaactattacataaacaagtgaaatgacttgcctgaagtcacacagccaatgaaagaaaaccttgggattaaatcccagccctgcagacatgatccagtgcttccttctgtgtggtgatgcctttcaaaccaatctctttgctactaagaaacccaagaagaagattcccaattctactgctcttccacagctcttgcagaaaacctatatatactattactgctactgctactactactaataataatgtgatattagagtaccaaagggctccataaattagggctaactagagaagaaatcgaagcacaagaaaaggagtttagagggggctgcaggtaagcgagttaattggatatgctgattggaattggatattcaagaaaagaagctgacattaatttctgtccagatatagctgtgatttaaaggaaaggtactaatggggttactatttcattctcatttcaactggaggactggacgctaaatctctgctggattttacctcacacgctcctgccccaaagccagccctgataaactgagttttatcccccaggtaaggcccccaaaaattaggttctgagtttactgttgtccccaggaaataggagattgtcccactttgaacttgggatcctaaagggggaagagtggatgagggggaaatttggacttttagatgacccatctactctgctcagcagcaagggcagctatgtttgcccattattagccccctcttcagagaattcaggctctagctgggaatctcagttacgccactctccagctgtgtgatcttgagagagttgcctaactctcctgtgcctctgagtttttatctataaaatgggatttaaaatagtatttacctcaggaatgcttggaagtgttaaatgagttcatttttgttaagtactgtgacagcacgtagcactgtggtagctattattaaattctttaggtgaacagaacctttcagaatccaagtctatcctactgccttcaggcagggccacatttaaccatgaagcaaaaggggttatcctgggtttaaaaccctcctgagaaggagattacagtctcctatagtcacccattctatagtaaagtctttggttcttactagagctagactaaatgtcctcatgtcagagtttaggctgggcatagtagctcacacctgtaatcctagcacttcgtggggctgaggtgggaggatcactggagctcaagagtttgagaccagcctgggcaacataatgagaccctgtctctaaaaaaaaaattaaaaagtagccagttgtggtggtgcacacctgtagtcccagctacttgggtggctgagtaggaggatcgcttgatcttgggagctcaaggctgcagtgagctgtgattgcgccactgcacttggcctgggtggcacagagtgagaccctgtcttaaaataaataagtagtttaggcacattttgtcttttgctggtctcagtaaagactgtcactctcttctgttccttgtgctatctggctgctgagccttgtccaagcaaaatagccccagtagcttctgcatttccaccgaggtcaagccttcccagaagaagaagatcccaaatagaaaaacacactccagtgactcattccacctgtccctgtcacctccctcctttgccccatctccagtatcctccgctgcctggttggattttgggacctgtgcatcttggtgttgcaccgcatgcaagggctggttcagtttattgctgtcactttgtgggacaccatagaataaactcaattggttggctattaaaatcccactcttgttttgggactccttgacactcccctcaccactggccatcctgtttctggcaaagacagaggacagctttgaaacccaaaatttcctatccaagacagagacatgagaaaaatcacagacttaaactacattagcagccttcttcctagtcacttccaaggcattctccccctcagccatgtgctttcctctggaccccaccagctggggctggtttgaaccccagttccaccatggattggaagttttgaatggaagagtttagacaagattagctccagtaatttttataagtctatgattctcctgtgataggcaccaagcagattgcttcttccagttattcagagaggaacactaaggctcagagaggtaactcacctaaaagtgtgccattaggcagaaatcaagccccagggaagaacagagtcagaatggaaacccaggaggcctgaggcccagacttaaaccctgcactcattggtgtgttgccttaagggagcaaaggggatcaagggaggggaaagacctctgctgcccaggggatctgctgccttctctctgccagcccctgccccacctttttctccttgacctggcctcctggcccctactctccatcttctctgaccccctatacgtatcttgaaaggtgactccatcttggggcagatagcatggatcgggggtgagtggggggagtcacagacttcttggccaataccacatttctctccgggatttagactgaatgaaataggatagcttagttcgggttcagtaccaacaacattttctgttctggtttggttttacctctgacatttgagacttatgtaggtttgattctggcttcaactggcttattaaaagattggggttgcagacagggaaaaagaaaaaccttcagattaggtctctgattcagtaaaatattaatggttgggattggtcctgaccgaatgcagcagacaatgtgatgataagttgtctttggttcaactccagctctaatcttgccacgggtaccatctggtcccagggaccacagaggaagggccctcaccatggcattcattctctcttctgacttggtgtgcaggccttgctgaatccacgcaagtgcccaggctctgggagagggtagaggccaacatgtaggaaaaggcagatgaagaatattaaagtgccattagcatgaaaacagcggactattccagccagcagagggttaactggccttctggggcaggagatcccagaccaggcttgagggaggggcctggctctgcagctcctgggacccagccctgcagctgctgggacgcagccagcaccttgaggaggcttaaatctccctggagaggagtagctgtcacagggaaggtgggagaagcactgggacactttcccttcagaggaggggcacagttcagactcaggcaagaagcagggcctgaaatccccattttatggagacagaaaactgagaccaggccaaccagaagtcatggcaatcacatctgccctctacctcttgcaatagcccaagaacttttgtgactaaaagctatgatatttctgtaagaatcttatggaaatttgggtctgtctatctaagggagaatgctgctttgaatgtcaaggagaaccattttaactgtggggcattttcccacacagagactcttattcttccttctgcttgaatctcatcatcagaattgctccaggttacaggctggtggtctcagccgtgtaacaccattgctgactcttagaatccccttgaccctgtgaaaatgaaacaaatgggcttctaacaacatttctggaaggaggggctttactgatagatgacaaggcaacagccttgaacagcaggaagcccattcactagggagaaagagggcaagagcggagcataggggaaagtcccacaaggggagtgatgaggcacaggaatgggtgagaagagtttatttggttccattgaggttacctccttaagttcaggcccagaagcccccaagtcgcccagcaaagcaggtgaggaggagaacatggtgtccttgcctctagaccctgacctaccattttcatccgtggggtatagcacaagggcctcaggcaagaatctgctgtttctaccaccggggacccccgggccagagcttcccaccccacgatggactcatggtctgtttcccatgtacatcgagtccatcccaacccaacaggtacagaccaagccctggttcaagctcctcaaggatgcagattctcaggacagtagagaaataggaatggaagctcttctcccactcccctagctctgcaatcaatagtgctgttgaccttccccactcggccaataagaactgaaaacacatccatccatccatccatgctagtgtacttgttgtggcatcaggcattgaacttggcacttgggatgaataagtcatggtgccttggcctgaggagctctcagtgtggtgtagggagaaacaggcagagggagaagatgatgaagggcccaagagagaatccaaagggtgtaagggagaagaagccttaatcttaaaatcttccagggaaaatgtcttttgacctcactttgattcagccctaaggagtctaggatatgctgtcagttggtgcacagttcacgctctttcaacaagcatttcacaagcattcccttttatccgttgccggctatgttcccagtcgcatgctagtcctcagagggttataagataaatagaaaagatatccctgccttcaaaatgttgacaggacttacgcacatctgaagcaattagagaacaattcgagtaggtagtcaatacatgttagctagtatatatacaatgaacaaatcaattgattatcctaggacaaaatgtctggcaaaaaaaaaaggcatcaaagtgggagcaattaattagccattagagaggatggggaaggcttcatggaggaggtggggcttgagctagagatgggcagaggacagtgaaaacaggctggggtcatgaatattggtcaggagtcagctactagaaaactagaaaactaacaactagaaaaactggggatggggcacattcagaccaagggctccttgccaccaactttttgtatgaccttagggacctcttttctttgaggtcagcattcaacataagggcctagatagtacttttcaaacccttatagtaacagcatcagcatcagctggggaatttgttagaaatgtacattctcagcgctcatgcccactgaatcagaaattctgggggtgggcctcgcagtgcattcaccaagccctccaggtgattctgaggacacactagtgtgagaactgcaggactacctcgctgctcctcgaccctggctactcattaaattcacccggggagcttttaagctgaagaagatgcctgggccccacccacagagattgtgattaatggatgtagccctggcattcatattttttaaagctccccagatgattctaatgtgcagccagggctgagaagcactggactagatgacatctcagtcctttctgacttattttcctaggatgggcttggagaggctaagccaggattcctggctccccacatctcacagggtggatttgtggacagtcagggcatatgtttgggggctgaaagaccctcctgggatccaaaaatctttaatctcttaatgagcagctttttgatgatttatataaattgttcaccattccttcatacttgtctgaggctaagatactgtgaacagatgttgactttcccaccccagccaccatgaaggagtgtgcataagcacacactcacttacacacacatacaatacacagtgctataaatagatgtacatgcacacaaggataactgcatagggatattcaaaatcattcccaagggcgtatatgcacacacaaataaatccactgtcagaaatcccaggcccagaacactcagactgcttgggaaaggattccttttggtggaaattgggctgtttaaaagaagtggcacttcagtctatggagtagtgactgggggttagcaatggtcttctgtaagctacctgctctgggcagaggcaggtagcccacaggggaatactgagggcagatgctgaggacacccttgtttctcatacagattcgggccgacggtcccccccatggtggggtccagtacgagatggtctctgtgctcaaggacggaagccccatcctccgggacatggccttctccattgatcagcgctacctgtacgtcatgtctgagagacaggtaagtgctaacatccatctctgctttccaaactccaagaaactgctgataatctgtcacctttgttcagaaactgttcagtccaagaagagagacctctgggcttgcagcacaggggtcttgagagaggcagagtgcctgtaggcttttgcagggagctagagagaagcagccgggggccagccacttcccggaggcttcactctaggccacagcccctgtctcagtaagtgatgaacagccctgcaagaacaggccagactgcgtggagcagcttggtgtgattaggaggtagatttactgctctcaggcccacagagtctgctgctcaagggagccaaagaggtgtaaataatccaggcctctgggctgggcccactcctgggagaggcagacccaagacagggccccagaaggaaataaaaatcttggcgtgagtcttagactggtgcagagtataagctggtcagctctgggaagctgaaaccaggcctatggagatgggaagccctgagaaatagacttctaccctctgtagggaaacagctgagcaagtcttccaccctctgggatggatggagactgtatttcctgtgaatatgtgtgagtagagagaaggcaaatgcagagagagccatggtgaagggaaagagaagcagggaaggcaggggattcatgagatcgacagagacccagaaagctaggcaaagaccttagccaagccggacacattccattcactcggtcagtgggttaatagttgttcagcagcagcagcaggggtcttgtcatttttcttaacagggtaagtaaaataaaggccaaagaaatgaggaaaaggattgccagtctgtcccagcagctgaggacactgacttaggctagagaaggatgctggtagagctgaaggtccagagagctttcacaagttgcttcccagctcatgtcattctcagagaattctgcaagagttccaggtgtccttgatcaaacttaccctttccagagctctccttacctcctttcttttctaatttaaaaggagtctgaatcaggggatgagggatgagcgaagaagtaaggaagagataagtgtgcacacgacagcattaagggaagcagtgatgcagttctgagttgaaaattagttcttgaggacagatgacgtaaatcatacgataattgcatgccaattatatccagatcctcttgaacccacctgtctttttcaccttctttcatgtggcctctgccgttgaagtataaacaggtccagatgggaattttgtggatctgtagacagctttgcctaacctagagtgggtaagacagtcttggaaataaacactgacctatcattccgatgaaacagtcagtgggcctaaaaagaactattcctgggcacatatttattgggaacaaagtgctgggaatcatcaaaatgaatgagacttagccactaccttaagttgattgcaatctaacaagagagagacaggtacccaaatagcctaataacatcagattgaattctatacatgctcttttatcctgttcttctttaagggaaaacattatttgtttaataaaaattgtggacgcttgttatacaaattcaagcaatgcatacagaaaagaaaacagcagaaggtcaccaaatctcactacccaaaatataacaccatgttaacatttgatgagcaccattccaggcacttatgcagatatagatacagaaaaaaggacaggtagatagatgacaacctatattggtggataaaacgatgagcagaggttaaatagactcacattttatgcaatgttttcaagaggcactgtgtgtagcagaggaccaggcgggtagctctgggtaagagctctttcttagattctctgagcccagcaaagtgggaaggaagaagtgaccaatgagaccttagtgggaccgagaaggtaccaaggcatatattttagctgcatatctttttatccaatgaaacgctttctgaaaatgcattcaaaatgtatccaaagaagaggggctgggtcagggctggaggcagatgagtgggtttcagagaatataatcacctcctagatccatatctgatgccatctctgagaccatcagcctggccacaccaagtgtccacacagcttatctgtaaatacccctcctctgtcccaccttctgcttcaggtacccagttcttgttacagtctacaccaaacagaggggtttagcagtagccagccacgatgagcagagataggaagaatttgggtttcatgccatgggctgcctctggtcaagtgaaatattagtagggggagctccctgtaccagatggagctgtgattacaaggcaaagtctgagggggatttgtggtggagctctgaggcctgtcacctggagagccgtaaattgtgtagaaataggtagccaggtgacttcaccaggggctcagtccaaagctgaaagccaagaacagctcaggaggcccatctgtctgaggccggctgtgagttaagtactcacagacagctcagatgtctccaaggaagcagttgaatgtgtggcaggagaataatctgtcaaaatgaagtcagatgtcctgggttctagtccagcttgtgttatcactgatagtagaatcctctgacagctttggttcctcttttatagctgagaggagttgcatcagataacaccatatctgaagtccatgggtatgatttggacttcatttcaccattctctatctgaatggccttgcacaagtcacttaacctcagtgtttctcacacaaggtcagtgtgaggctcagctgagacaataaagggggaatttctttttatactgccccacatgccacattctatatggcccattctagctctcatgcctcatgatcccatttctcaggagtatagagatggtgtgtgatgaagagggggcagggggacatgacacacccagtcatcctcagcctgagccaggagatctgtgttctaggcctggccccatctctgacttcaagggtaacctgggccctcaacttctcagagtctcagtttcctcatctgtaaagatggagattataaatctaactctaaagtctctttcagatcttatagaaatttgtttaaggtcctaggattgggactctgctctgtctctctccagaagatgataccaaaagcacaaaagatgggcctgagactaaaccaaaagcagtgttctctttttcaatttttaattttaaaattttttattttgttttgttttgtttttgagacagagtctcactattgccctgtcacccaggctgtggtgcagtggcatgaccttggctcactgcaacctccgcctcctgggttaaagcgattcttctgcctcagcctcctgagttgctgggattacaggtacatgccaccacacacagctaatttttgtatttttagtagagccggggttttgccatgttggccaggttgctctcaaactcctgacctcaagtgatccacctgccttggcctcccaaagtgctgggattacaggcatgaaccaccatgccagagcaatttaaaattttttttatggaaatagagatggggtttcaccatgttgcccaggctggtctcgaactcttgggctcaagggatccgtccacctcggcctcccaaagtcctgggattacaagcgtgcgccactgcgcccggtcagcataatgttcttaaggagagatttatgaggccacatgtgctcatatgagcatcttcgctgaagggtcaacattgtagagaaagctggaatgctggtttggttatggatatgtacacatgctctcgacttatgatggggttgcctcctactcaagccattgtaggttggaaatattgtaagtcaaatacatgtttaatacacctaacctcccaagctcatagcttagcctcacctaccttaaacatgctcagaacacttatcttcacctacagttgggcaaaatcatctaacacgaagccaactttataattaagtgttgaatatctcatgtaatgaattgaagagtgtactgaaggtgaaggagagagtggctgcatggatacttgaagtacaatttctactgaatgtgtattgctttcacaccactgtaaagtaaaaaaaccataagttgaatcatcgtaagttgtctattttcctactttgagacagcaatttaagactttcaagttctctaaaagtcctgagaccttttaagatatcatgggaatgggtttttcatcatttcgctctaaaacaaatctctgggcaacctactctcatccctgtcttccaccctgccccaacccttgcctctctgttcccccacccatcctccaaacatgacacatgtaatattcttggggccgtgagagtggaacacatagtgagagtaaaaccaagtctctggtcttacattctgcctagagaggttttcatctccccacagagctagaacaatccaatatagcactcatgtattctctttcactctcaattaattaattaaatgtaattaagaaataggactagtaagtgttgggtcgttagtgtcactgcctaacaagtcaatggtaatgtactgttaatagatctaagaccggccagtcccaggggaaaatttgggaactgattccccaatcctattaattgcccaggtgctccactgagaggatgcctggctctttcctagaaagtctgccccagcttcactgacagcgaatcagcagatgttatgggcatgcatacaagttgctcccatatcctcagtgtgtaatggaagtcagacagcgagtcaagggaaaatcaggctatgagccaagtgaaaaaccaagcaacaagatgaaaagaaacttgatagccccagttttcacccaacttgtcaggctggccactcctagaaaaggagtataaatctatacacagggtggatgggaaaagagtatagggatggaagcaattattctattttatactttaattagtttgcattagcagagggaatagaggcatgaaatgatccagcgaagggtgaaatggaaaaagggagtcacagtggagaatggctccgtacagactggaaagggccttgggaacagcagaaaggatggtgatgggtgtgtgtgtttggagtgggtgctggggcatgggattctgttctctacttcaaggcctggagaggcaaaatagcatagatgttaagagctggcccgtgggagtcaggccaacctccattccatagacacttactaagtatatggttttgataatgttattcaacttctctaaacctcagtttgatcatctgtgtaatgggcctaatgcaattgttgtgaggattgagagaatgcatataaatcacccagcatcatgtctgacacatagtgttttcaaaaggtggtggtaattattattactagtagtagtcttagaacttctttggaacttcagaaagggctagaaacatctccaccacaaattatggctggcacagagttcccagtttcaggcagtggcctccaactgccattcctcctgcttactcccaagcgctgcctcagaagcctctggcctggccaaatgacagcactgagctgagtctcccataatctggtatttattttaaaaatccaggaatgtgcctggcagactaaacagtcccgctcccctcaatatacaggcaggcagccccaggccgatgtgtgaggccagaaggccaggatagcaggcatctgtggagagaagggaggaggaacctgtgagcctggggctgcatgcatggacaccgggccagaaagggaatacctatggggcttttcatttctggtttctccacgtaagtaacaaagtctcacgctcattgtgaaagatgggtctgccactctccaggtagtgaacattcagaccccagttccgaatgtcctagatgtactagtagttggcacactgttctggttatttactgctttgtaacaaaccacccccaggtttggggatatttttaaaaacacattttattatgctcaaagactgtgtaagtcaggaattcagatacggtgcactgaagacggctcatctctattctataatgtctgcagcctctgctaggatgacacaaatggctgggactgactagaaggacaaggggctagaatcatttggaagcttctccccctacatgtctgggaagtggaagctgggatcagttgggactgttgaccacagtgccttagacaagtccctgccatgtgtgttgggcttcctgacagcaggcggcccccaagacagtcagaattcttgcttgtggcagctgaggactccaagagtgagtactccctataatgaggtagaaattgcatcgcctttttgtgacttggctttggcagtcacgcagtcggtctgcttgcctcttccctctgctgcccaacacccatgtgattctgatgcgtgtggtccatgaacacacattaagaacatgattccccagctaccaaggtcatggaatcacagagcatcagagctggtaaggactgtagagagcacccattctgaccccagataagaaagacgaggcccagagagcaccctgtttagctgccccatcagcattgtgcaacacccaacgcccagctggagtcatcaaagctggactgatttcttcaaacatgtggggaagtactgacaactttaaagcttgctgttgatttgctgaaggttgtgtaagtcctacctgaggtctatcaaatgcctgtgggccctgaaaatgctttcaggaagggtttgcaggaatccatcagtagcaggatcacactgcctggaaattttcccatggagggtatgctgcttataaatagctctccaggcagtcttcctgtggcaatattgtctcatcttgcacaggagcaggcctctcagtgacttaccttcagtatgtgggggagtgggacctcatccccatggattacaggaaactggctttttaaccacatctgtttaacgtaatttaaaagagttggggcaaggagactgtcagcttggagtttcagaaacaaaaattatttggaaagattgtaaagccaccctttcctgaaggtcttaaatgcaggagagaccccccaccaccccctaagaaattctctgcattgtttgaagaccctacgcagtatctggggagagatggaaggacaggccagacccttagcataccatccaccaatgtccagcagctgcaccagaaaactaattgtggtttcctccatttggaggaggccctgtcaactactaacccggatctagaaccaaaaataagaatccttttcagaggtgctattgtgatacatggggcagtaagtcttctacctgtagccaaagctactgaactgttaagtccctaaggcacctaaagaccttggggaagggaaagaaaaaacgtggggagtcacacttccagatgtcccctgctcatttattttgacatctcagactattattttgattgtgcacatttgtttagtccaggcgataaggcttcccagggtgcaggcagagcatgccaaggtgtatttttacaaggcgggcaaggtctcagtaacaggagacctcccttctgcctgggctgggaggccttggctgagcctctggggaggagggaatgtgagggggcagggaggagagttgagcctgagggactttggggagaattacagagtttgcggattaggaaagtgaggataagcgaattgctgctgcacttttgttttaaaatgtgtcactttcaatccaaggctttgatgcacatgtgtttctggttaaggatgcaggaccccagtgtggcccaggagctgagcactcacatcagtgcctttcccaaagaaagggcggagtcctgcctcccacctcccggggctgtgggtgcaggcaacaatgaccacctcaaacccgggttttgattttttcctctttctttcccccatttcaaatgtcaaggaacaaagaggctgatagggagctgattctctggctattaatattctcatcggagtattttttttaaataaatattttcacatgagggaaaggcaatgcaaacccaccctattaatcagacacttggcttgctgtatttaagagagaaaactccagcctcttattttgaaatcctttggtttggaaagaaatgattgaatacaatgcccaggctgggagaagtgctgccaaaaacctcatttctctaaatgggcaagggggttggagactctctaatccttgatgagggatttgatttttctttctagataggtattgctgaaggatgacactgactgcccagaatcatgttcctatgaccaggagatgggaagttacagtgtctcaccagaaggaaacttaccctccttcattcttttaaatatggggaaactgatgcctccagagaggaaagtcatttgcctaggccatcatctgaattaccagaagaatcagggtaaatcctgagtaacctggtctagcccagcatcctttcccaacttgacaacagtttcactcagcacagacaagagtgaacactgtgtttaaaaacttttaattagcaacattaaaacaacctaggcccaagagagttcctgaagatgttccgaagggtcaaattaaaatagggaaagatttgcatattgtttgcatatgcagactcattcattcaatagaccattaagtgttgaccatgtataatgcatagagctgtccactgacaagtcatttgcatatgtagatatagatagggctgtctttctaagtaatattccagcaaaagtctccttctaaatagggctgccaggaagataagtaccttcttgatttctttttgctgttttcaatgcaacaatagcactattacgtatgcttttgtatagcaaaaaataaaatagaatccctgccctcaaggtggtcaaattctggagaagcgcaatgatgtatagataaatcacaagataaggttatttatttgtacatcagagcaatgctgtagaagagatgtactatgtattcaatgattaaagtaactcataaacgcataccaccaggaagggacctgtcctggttccctccctaattggggtcactcgggggactcaccctctccctaacacaagaatccagagctggtttatccagagattctctagtgaagagcagccctttattttacagaagaggagatgagaggtctgagggggcagtgactccggagaagaaagggtataccaagccgaatgtggagaagcagacaatgattgactatcagtagtttcctgacagccatggggagcagccagcctgggttcaagccctggctctactgcttactgccatgtgaccttgggcaagttgcttcacctttctgtgcttcagttacctcacctgtaaaatgggcataattatggcatctgtttgaagattaaattaattaatgcataaaaagcactctgaaaagtaccaggaacctactacccgcttagtaaatggtagtagtagtaattatatttttacagttgtgcccccatacatcatcatcaggccaagccctgcaggtcatgctttgcaaacagccacacctaaaaaaagcttaaccaccctgccttgcctctcagccctaccttatttaagctgtgttgaaatctaactaatatttttgccgtgtttttcttattttagtttacaaacatggcctcagctaatacaccagtcctatgagataagtattattgtccttgcctttttttaacagataacaaaactgaaattcaaactgactaagtaatttgcccagggccaccaagctgtccaacagcagggctgggactccaccccacacctctgaagccaaatccacacctcttcagcttcctgagacagcgccccctggctgccctgtggctgcagaaggctcctcccctcctgctctccccacacccggctcccagttaggaaaagggttcagaggcggctttctgggctccaggaggccagcacagactcagtaactcctcatttgacaccttcaaggagattggagtagtgcactgtttagtttaaaaaaccaataaaggaaagcaagcactgccccgggccctacatggacagtcaggggaaatgcctctgcaggtggtcagaatgcagggagaaaaagcacctcgccccaggaagttaccgcggagtttctcctgcgcagccagccaagcgcctcacgagcatgatctcccctcttcacaagaacctgggaagacaggtattatctcccccgtttgacaaatgaggaaggccaggtgcagcaatgttgagggatctgagctaggtgtgtctatgacttttaggaggcatagccgggagtgaggagcctgtctgtgtggctgcaaagctcctggactgctcgccctcccctagcaccaggagagcccatgcagagaccccagcgggagacatcatgactcctctgcatattttcttacccccatccaaagctcgtcggtctggcaaaggaaaaaccttttcaaggagggcagctgcagaacacatgtgaggcattgaagccccgattcagcttctctggtgctgtttcaagtgtgaaccatgcaaacccatatcagctcaatccctggccctaagtaagaggttctcagactcaagaaagcctcctgtgttccccatcttaagtcttatccagccagacacagggggccccggaatgacaccccagagctctgcagcctgcttttcagctccttccaggagcgctcccttgtgttccctgcgttgagtttcagtaattgaatgtgttttatttagaccataacatttagtgccactttggatttccaattaggcttcaatcagatgccgagagtctgattcgttttgttgttttgatcaacacgaaagatggcaacatcagaggagccgtcatgaaaagttacttccatccactgatgactaggacggtttctgtagtgtgaagatgcaggttcagaggtgtcgagagcggcaccatgcatcaggaagaggggcagaggcaaaggggaagtcagtgaacccctggagacaagcgcaattggaagtcctggggtgcgtggccgggacttggcaaggtccctctgtatgtgggccagggctctgggtgcccctgagggaggggaaaggtgttggtctccaccccagcagatttctcatacaaatggttcaggcttgaacagctcctctcaggccttttatccagggacatctttgtgaacacagggttcccatgaagtgggaagctgaccaccactttttgatttctttagtgaaggcctctgaactcctcagccagaagtgaccagctgtactcatttacagaaatatgtggggggctttttctcaccacctgtgagttctggccagccactggcacatgctgtctgtcagataaggtttctcaatggggttgatcctagggacaaaatttggaatccaactttgaactgccagggagtttgttgcgggagggaggtggcaggatggcagaggggtgatgggagagtggccggggaggagtaggtaagagtctgcctgtgccaatcatcaagagtcactcaccacgcatctgagtcaaggtcaactggagcctcattttccccattgataaaatgtgtttgaatgccccttgcggcaatgacattgggtgcattccttctagccatgaatgtgtatggaatggaggctgtgtgcacagcgctcggaggctgacctgggttcgagtatgcatgtgcttgtgagaacagaagttggtggggttggtgagtgagatgagagcaaacgttcctgtgtgttctgggggtgttagtgtctacactatgttagtgttagtgtcttcactatgttagtgttaggctctttcatatgccattgcatgtacccactgggggaaatgtgtgttcaagcccttctcctcccagctttacactgtttttagagcccagcttggctgcatttccagctggccctttgatctttctgtagcaggccagctcagggactcagcttttcagccgcaatctccacttcatagagtgcatgccttgtggttaagttccctgagcctttgccactgtgcctcaagttacctccctcacctcaccttgttccccccagttatgactggtccccaccttgcaaacaggttggggtttgaaactcccaccaggtgatgagaaggctgactgtgtcatcagctgttggtgacttagcaaacagtctgggttcagcctctgtccctcaactaatatttaattataagaaagaggtgggcagagatgcaagccaggtagaaggaagacaggagagggaagaatgaactgagatgaaaaaaatgttctagccacttagccattaaatagctcatcaaacagcctttgaggaccaactgtgctcacagcaaagagcttatccttgcactatcacacatacatatggaaaatagacaagtaagtagtgagttacaatacagtatgcagagtgctgggattacaggagagggcaccacccaatatagcctgtgagtcaaggaaggcttcctggaggaggtgatgctctaggtgaatcgtgagaggggaggggctcacccagtggaataaaaaagcaaagaaatattgttcaagttaaggaaagcttgggagtgtgagagagtttggtatattcaaggactatttcccaaaacttgatactggcagagctgaaggcaaggattaggaggcatccatcctcacagaatttctgcagcatgcaggtgagcagccttcaggggggctcaatccacccacctttcctaagagggattcccccagccccagctgctacaacatagaacttggtaggaagccatcatgcacccagcccctggtgctctctgtggcaagctcaccagcaggtcctctggacataccctgtatctaagtaacatcatcaagaaaaaagatgctagctctggcagagctccaatgctgaagcccattgtaaccttgccaatcccctcccctcaggacagccatttctctgactgtacagcaaggaagatctctgcccatcccaggttcatggaaagaggataaaggaaatgagatagtgcacccatttcaggcattcattgtatcatttctgcagcatttattacaggcagagaccttgcctgtctgggctgcttctgtctccccaagagataccacagcatttggtacttagtaggtactcaagaaacactagggctgggcgcagtggctcacgcctgtaatcccagcactttgcgaggctgaggcgggtggatcacgaggtcaggagaccatcctggctaacacggtgaaaccccgtctctactaaaaatacaaaaaattagccaggcatggtggcggtcacctgtagtcccagctactcgggaggctgaggcaggagaatggtgtgaaccctggagatggagcttgcagggagccgagatcgctccactgcactccagcctgggggacagagagagactccatcccaaaaaaaaaaaaaaaaaaaaaaagaaagaaacaggaaacacttgttggagcttaggaagaaagagaggagggggaaaaaggaaacaaaggaaaatatctatgaaaaggaggcattctagtttactgtaaggcctcatcttgggaggcaattagaattgtattcaaatcttggctctatcactctttgatatggcctaggtatcctctctaagccttggtcttgtcttctgtaaagtggggataacaataatacctacctgataggactgctgagaaggtgaaatccctatacaatgcctgggacagtgtgagagccaaaccctcgaccatggctctagctaagccctgtgttttctccctgcctccaaggtaatctccctctttcactaccatggagtcccccacaactaacacgatgcccatttttcatccttaagtcatctgccagttgcatctatttctagcctctgtcttatgagacaagaataaggaaggaaaacagataactgtggaggctcatttgccagttgtcagctcctgccgtcagctgggctctcttgtctgcttctccctgggtgcctggaaaaatcattgtgaccttttatttactggttgatctagtcagttcttggctccggatctctctgcccgcccctcaggctccccgcagctctcccagccctccatcagccagtgtgggttccctgactcccaggcagaatcatgctgcaagatgggcaggctgtgctgggccctcggagcctgcctgtcttcatgatcagattcctaaaaacctgtgggcacagagaggaggggcagtcagagctattgatcttccctactcgctgctcccgccaggggggatttctactgcagattctctcctgcaggcctcttcttctcaccccgttttactgagcagctaaactgagcttgaggctagcgagtggctgccccggagttactccgtaagtcagcagcatactctctctcttggcccctcatccaactttttgagctttaccaggttgttttcatccttttcccttcatcctcttctactccctacatcagctcccagcccggctggctggccatggccagcagctatttctgcttttccttctctttctccctgggaccagccatgcatttctctgcagctcctctgagccaattggactgaggtgtgcacctcgggaagtggagggtggctgttgggaatagggacaattgtagtggtgacaaggagacaggaggctaacaagtgtgtgctgacaagaagacatgccacattggtccctggaaggccaggaatgagccaggcagacccaaactatgtcttgattggctgcaggagttaatggtgtatacagcataaatgtgaccttttatttactggttgtgagtaaataaaaggagtatgtgtatgtatgtgtgtgtacatgcacacatatgtgtatcatacccaaatcagcttctgcaaaaacaatcatccaaggtagagtatggctttctcactccattttcttcaggccatctccttggacttcccaaagttttcattgcccatgttggaattggcaagccttatgcctccctcaaatttggagaaaggagttttaaaagcctcttgtgcaagtcagctccctgcttcccaagctctcttcttggcccttgctgtcagcatcaattttctgcagggagtgatttaaccttcgtttattcattaattcctttttcctcttaacttcattaggtaagatttataaaggtgctgaattggaaaggtcacctgtccctgggcccaggacacagtgtgcctgcctctcttcttgtgtgcttcctttcaggagtgcttctgaggtagggaggtgaggagagtagcagaagagagagtgagagcagggcctgtgctctgggaaggcagggcaggcaggaagataccataggctctgaacacgcttccaaattgcctgcttactgttgggaggcaggatggcatggtggggaggataggctctgtgttaggcacatctggagtcctggcactacccttcctaagcatcagccttccccaagttacctgtcctcattaagccttcggtttcctcttagaaaaactgtcaataatgctagaatccactccatcaggttcttgcaaggattaaatgagatgcttcatgagcatagtgcctagaacacagcaaacattcaacaaacaaattgaacatctttttaaaaagatcttcagttttccaatacaagccttggtagcactgggcagtcattggatcatggaccactagagactagtgtgcagaaagtctatttgattcccccaggcaagctaagcccacatagtctgtgactgaccctatctccagaaccacaggaaaagcctgtggtttcctcatgggggagccagaaagaaccaaaccaccccatggggtcaaggttgcttcccagggtctaacagatttctgcagagagttagggtaagctagcctcctgctcactgctgtcaccctctgagacccacccaccaatcgttcatggtcgtgggccttttttcaagtccctgaggcctgctgggctcagctgctaaccatctcatcttaaggagctgtctctctcattgccagcctccctggaaggaggggatgcagtacagactaaagagcatgcaggtgttttgaacttgcacaaaggtcagaatatctgcctgctgccatctccatgttgtctttcctcctgtgaccgcaacagagctcaaaaccatctcaatccaccccaatcacagtgaattcagtcctctgaatttctctaactcttatggtaaaactgcctgtccggatctatccatgtggtgtcttcccccatcaggctttaagctacttggggagcggatgcaggttggaagcagcctatcccctcccagggccatttgtgcagccagaactcaatcaggtgtttgagaaaataattttaatagaaaagtacagaggaaagcgggcaggcaaacctgttctgtgtgccaagctgagaatattcggtttgaatatgatcacagaggattacaagaattaattttattttatctaatatgcttcgaattgggcttctggaattcaacatgcaaatgtatgctcctagtgcaaattggagcatgcccagattaatggagaaaattctcatcaccttgcttttctcagaatgcgatttctctcacctgggatcacttatttgtttgccaaggatgaaccaaggggtaaattctgatggaggaaggaatctgagggctgggtaaatctaaccagtgccttccccatggcagatggaatgaagagagatgctgagcagtggatgacagcccttcaaagagcatggggacttcagggcagtagccatgggaagtccaaactgctcctctggtcccagaccagccttcactggtatacagatcacttcaaacgcattgtgttagttcctgttatcctcacctcccggatttaatgagattcttgggcatcgttaataaacaatgcctgacctttttagagtggcaacattatattatttcatgaaatatggccctacacaaaaggccatttggtatagttattgttacattttgaagtgaatttgggtctaataatgaatttggttctgagactttcacagtatccattgagaaaaccggagatactagtcactgaatagcctaaatagaaagtgaccagtgtttatacccgaatgtcatggctataccccattctctgagcttctgccctcgttctctagctgtggcctataccattactgccgtgcctggccactaaggacgctgtgacaccagcttggcctagctgtggacaatttcctctccctataattcaagctaaatcaatatttgaatgtataggaaagaaagaaggcctcacatgtataggaaatttattttctcaaccctctttagttgggcttgcctaaaacatagggtatctctggttcttttttttttttttttttttttttgagacggagttttgctgttgtcgcccaggctggagtgcaatcacatgatcttggctcactgcaacctctgcctaccgggttcaagggattctcctgcctcagcctcccaagtagctgggattacaggcgcccgccaccacgcccagctaatttttgtatttttagtagagatagggtttcgccatgttggccaggctggccttgaactcctgacctcaggtgatctgcccgcttcggcttcccaaagtgctgggattacagacgtgagccaccgtgcctggcctggttctactttttaaaacaacttttatttaaggttcgggggtacatatgcaggtttgttatttaggtaaactcgggtcatgggaatttgttgtacagattatttcatcacccaggtactaagcctagtacccaatagttgttttttctgctcctctcccccttccctccctccaccctcaagtaggccccagtgtctgttgttcccttctttgtgttcatgagttcccttcatttagctcccacttgtaagtgagaacgtgtgatacttggttttctattctgacaaccactggattggttctactttttatgaagttcagtttctttaccagtggccctagactaacatctagtggccacggggcaatgttggtagacgtcagtgcagagtgaagctgcacacacaacataggctttaaatagtttctctctctggggtcaactagatggaatagatacctggtcattcccgtaactctccaagtagcttcccttagggacacatctcacttcagttatagaagaaaggtggtttatgttttctaagtccaatgactagccgcgtccttttcaatccagattagaagctcctccaacctcagaaactgcgtttggcccaagggtactgctttctgctttcccgcatcctaaggctacagtcttaacatataaaattactttaaacataaacaatgacagataaccattagaggagagtcattcttttacattgtaaaaattgaactgggaattgtcactttggagaggtaagagagagacatatggacagactaccaggagacccttatttgtctcttaacattaaatctaaatcataaaaaccaagagacaagagacccttacacttggagcctatttcattttctttttttcatgagaggtgtgtggagggtgcaaaaggcccacactcgaaaacatcatttcactgtgcttcggtttccctgatggtaaaaatgaaagaatccagctgcctgatatcttaagtgtgtatattaatgactaaactggatcagtgggatttcttggggtgaacagtgggacagtttccatcatgacacttgcttatgtgggaggatattaagctcctttctttcaccttcttgcctctgaattaggaaatttaggaagttactaacataggctacaatatggatgaaccttgaaaacatcatgctagaagctagtcacaaaggatcacgtactgtatgattccatctctatgaaatgcccagaataggtgaatccctacagacagaaagtcgattggtgttgcctagggctggggcaggcaggagggaatgggagtgactactaatgggtatggggtttcttttggggggatgatgaaagtattctgaaatggattgtgctaatggttgtacagttcctgaatatacaaaacaccattgaattgcgcaatctagtttggtgaattttttggtgtgtgaattatctcattaaagctcttatattaaaaatcttgggaagatcatgtcctaattgtctggctattccagcacctctccttcccctggcaaccaccacccaaagaggaagtggatgctgcaccatggatgacatcaatgtgtacatctaagggttctgccatccttattctctgttcctcttcccttcttcctgctttcttccccctgccttgttctcctattatttcctattccttctatctcccttctccttttttccttattttcctactgatctcaccatccaatgggtgcatctcacgggctttccttaaccctaggaagctgaaaggggcatggaagagggaacaagagagagtgaaatttaacaatcaccataataataaagcgttaatattattataaattattattatagctgtccagaacttaatttaatcttcacaacattcctattagggagataatcatccacattttatagattaagacgtttttatggataaagatgaagaaataacactaacatgctcaagaaaacccagcaaatcagaggcaaaaacagaattcaaaccagggtctgtctggcctcagagcctattctccaaagcatgatagaaccttaaatatgaggctgggcctggttatttattgatgaattataatagaagtaatttgatggggttccaaactgcagtatctaggatctcatctgttggtctgatatttatagccgtttatgggtgatatctgtgtggctcttccattcattatggttttcattaagactctaatcctgtttagaagtctgtttgtcatttttaactctcctgtttaatcttgggcagccctaatcttttttcactaccagccagagagagacagctcctgatggctcttttcttctcacagttgtgtgcaggtgggggtatgaggggagatgagtgtggtgggcctgcctgtccatgactgtgtgggacatgaatgtgtgtatggagtatccgtgtgagctgtgatgtgagcatgtgtgaagttcgtgcatggtgtcactgtattggtgtgcactgtgagtgtgtggtatggatgtgtgtttgtgttcatgagtgtgtgtacacgagtatgggtatgggtttgtggagtaatggagtacatatgtgtgtgtgtcaggggctaccattcatgatatttgtattagtctgttctcatgctgctataaagaaatgctcgagactgggtaatttataaagaaaggaggtttaattgactcacagttctgcatgactggggaggcctcaggaaacttacaatcatggtggaaggcacctcttcacagggcagcaggagagagaatgagtgccagtagggggaatgccagatgcttataaagccatcagttctcatgagaactcactcattatcacgagaacagcatgagggaaaccgcccccatgattcaattacctccacctggtcctgcctttgattacaattcaaggtgagatatgggtggggacacagagccaaaccatatcagtattcttttttcataagcacgagaattcttgagtggaaacctaaccatctgcttctaaaacacagagaccatttcgcctcacatctgaccttccctggtgtataaatcctcctggggtgagagggttttagggaatcctgaaagggatagcgattgaccaggccccctctcctaaggcagtctcggagcccagctctcgctcatggtggaccttacttaggtttccccggggatggaaatctccttcccagcagcattggtttacagagaaattcttccattgggctcttcatccttgagggaggattagatttgttttactttttcggttattaagcgtctactgctaaggaatgagtaacaaaggaaatctacatgggtgacatcccatattgtgtccttcgctggccccagtgcacacccatagctcattctctctgctttggtttatggcgttttcatgcccaggccacttttcaccctgccccttttcaaatcttgcctcctccttggagccttgcctgctctcagacccaaaggtgattcccatctctctgcaccctctgacctcccctcacagacattataagagggcccacaatatttagtacttaaaaacattctgtctctgagtccaccaggccagaactctgggagacccaccagctatatttcaactccctacttccctagggacttcaaggctgaaatgatggttcaggaaatgcactacataaaggcatctggctgaggggcaagtaggggctgaaacaaaagtcctcattcatcttaccaaggcatgtgcctagatggggcacctctttcaaattgcaccaaagtaccgcattggcaagtggtagtcctgaaagggagtctcagagagttcaatcttcttgtctcagggcctgtagtagcagccagaggaatgcttaatgaagaacccgaaaagtgctgcctgcccctccccatgcgtcaaagatgaagtctggcctcacagtctgtcttcagaaagcttcaccccctctctgattaatcccaccccactctaatcaccacttaactccacatgcccttgtctggctccagcttaattttcacatctcagtatctgccttttaagagtcctgaatctttttttcacatctttgttatgctcttccaactagttagcaagctgtaggagggcagagagcatgttttcatttcctttggttttggccacccttgtgacatccatcagaaaactctgcacccagccggggctaaatcagtattgttgacacactgagtcaccagccaaaggtgcagagacaccaaagccctgtgcttagagctaggagctgggccagtgacccctgtccccaaaagccagctcagccaggcgcctcaggggacacaaatccatccactcacctccctccggttctggacctcattacccaaagaaatgtccctaaggattagaaagttccggagaaggccaggtgcggtggctcatgcctgtaatcccagcactttgggaggctgaggcaggtggatcacttgagatcaggagttcgaaaccagcctggccaacatggtgaaaccccatctctactaaaaatacaaaaattaaattagccaggcatggtggcacacacttgtattcccagctacttgggaggctgaggcaggagaatcgcttgaacccaggaggcggaggctgcagtgagctgagactgtgccactgcactctagcctgggtgacagagcaagacactgtctcaataaaataaaataagaaagaaaaaaaggaagttccagagaaactcagccaatctcttggtctctttctgtgatgacataaagtgctggacaggaagaggaagaagtggccctagcccttcaccagactcacctttccttatcacttagtgaaggattgatttgatttcttgtgttcaagggctttgcagggactagagcttcacccctccctgaaggtgtgtttgctttggatcagggacaggcctgtttgcggacagagcatccggagacctttcgctgggtctgtgatatggtggctttgttgctctcctagacaacaatatatatggcatgcctggccagtggcatcagggaacatatctcctgccacttcttcctggagacctccaaccccaagcccctggctgacctcctccactttcacctttcagcctcgtactcctgtgccacctcagcacactctcctgctctaaaaaaaaagaagcattcaggcagtcactaaatagcagtattgatgccccatccccacatgccctggaatgataatgcatcacccgtggtgtgtatccagacgaagccagattacgctcaggtggttaaaagtccaggtctaattagagttccagggaatcaagccattgtattattaatgattctccggcaatgttctgattaaaacagtaattttaataagcacagctcgatgctaagtgttcagtgagcacctaattacatcagttatgactccaaaattatttaaaattccgctttttttccaccggacccggcatgcaccaaataaaatagagactcagacaacttggtgattatttgctctaattaatatcctaagcacctcttttaaaaaaaaaagaaaaaaaatgtatctttgtctctcttctatctcccccaggttcccccctctgtgacccccagaagctcgatgacattggttacatttgaggcagccattcagggaggtcaggaatagaaagctgtgaggaaggtagatttgaacagtccccacactaacctccaggtgaggggaggctgcaaagtgctaatccccgttgattgcccaggcaggacaagaccccggggtgggggaggcagaagcacccagagagggctactaacctggagccagttcctgactgcagccttatcttcagcagaccagcttcagttgtcacatttaaccatcacgcttgcatctcctggaagagggtggccagtgggtcaaggggcttccctgtgtggctgttctcaaattcttctggccactttcgttgcaaaagagactgcctgacctattcactccctggaaggacaccaggatttcaggaaaaatggtctgctgaaccatctgaggattggtgtccacagttttctttttttaaacaattttatcagtaagttatccatctgtatgcaataagcctgatagtgaacaatgcggtgctgaagctctcacttcttgtgaacctcatgacaatatgctagtgaggaacagcagtccttaacatcatcgtgcccaacccacgtgctgggagataccatcacaaggcagctttctgctgtctcctactgtctcttcaagatgtttatcatgagtaaagttttgcctggatctcaggcaggtggcatagcttctctgcacacttgtagataatgaaaggcctttcgtcactccagtctcaaacacagcctcaaattggaatgataatgtccagttccagaccagacttaacctatggactgatgtgcagatttttttcctccccttgcctgagcctgctgcatggtctccagttacttctgtctctctctttctcatttgctttcccccaaatggatccactttgtagaaaggagaggggtcagaggagttctttctcacatgaactggaattggcagcagatagcctctgttctcaggcctggtggatatttctgactcttacagggctgggttcttcctgggcctcgaaactcccctgctgaaccattccatggctgcagctgtcatcaagagggtggtgcttcctcttgactggacactgtcctcttggccgtgattttccagttctctccatacagatgtccgcagtggggtcacagcaccacctccagggggtcttttggacaggttgtaaaatgcttcaggccagccctccctcctaaggtgtccacatctgctgcaagggaagtacttgcccatctttttagcctgccaccattgtgcagctggggtgggagcggtgacctcccaagttcctgcttcgctctgcctcctgcgggctcgccagcctaccctctgggtttcctcctgcatcctcctatccacttccaggtggtcctgttgaagggtggttaggtttcagccttccaagccctccctccaataattcacacagtctcttctttttcattccttcaactcttttttttatgtgagacagagtcttgctctgtcatccaggctggagtgcagtggtgtgatcccggctcactgcaacctccacctcccaggttcaagctattctcctgcctcagcctccagagtagctgggaccacaggcatgcaccaccacacccggctaatttttgtatttttgtagacacggggtttcaccatgttggccaggctggtctcaaactcctgaactcaaatgatcctgcccagcttggcctcccaaagttctgggattacaggcataagcaccttgcctggcccctttaatcctttcattccattcatctgggtcaggggatccagggtcaggggcagaagaatcatgaacctgaatcttgagaatctactctgaaaaattgtatggcagtctgcactttaccttagaacacagcattattgtatcatggtgccttcgtggatgccttaattttaacatccaataatatttaacaaatgtgaaaactgaggcccagggaggttaagggacttgcccggtacagttgagtatgtggtgaggctgagctacgttcttctgaccctaacagctatgtcctttccgtgacaccaaaagcctctgctgtgttgtaaacattgactattaaaaaattttaaaagccctcaagtcaccgaatggatactcgcagaataccagggggcctcagccacacctagagaactttagcatagtgcatttgattaaagagcttaaaataaaacctggatcattgggcaagtataattagcttctcagcaggtatttatagacctatttcgtacaagaaactgaagtgggagcatacagagatgtctcataagaagaaataaaaagaagagccctataagtaatctaaaaagttacctacctaagaagagtataaaaagtgcattagactcatgccaattgggcaggcagtcagattctcagttcagagagagaagtaacaaaggttgatcaaggaagacttcctggaggagggagggcccagggatttgcacatgagcgggagaggggaggatgtttggattagcaggaatgtatgagcaaaggcatggaggcaggactacacaaagcaagagaggaggccagcctggcaggagtgcagttgacattgaccaaaggggtcaggagtggaaacgtcagcctgggtgaggagcagaatttagaagtctgaaatgtcacactgaggtgtttggactataaacttcctgagataggcagagttttcttgttgttttatattttatttttattgttgtgtttctttagctgaaagaaactgtgttttgtattattggtacaaaacactgactcttgaaagccttccctgatttgtacttcccttttgctcctatagcttttaccatgtctcaatcatattgctaatatttcattatagtttgggaggtgtgtctgtcttcctgacaacactatgagtactttgggatcaaggttgtatctgtgcattctgtgaacttaatgtctacacagactgtattgtaggtgtttaatacatatttattaataataactatcagctatcagcaaggtacagggcttagcattttctaacccatgccatccttcatgtctaagaggcggtatggtgtaaaagttgagaacatgggctctgtagccagcctgcctgagtgcgagtcccagctgtataacttactgaatacatgactttaaacaacttcactgagactctctgttcctcagtttcttcttcagctgcagataacttttatacaacttatatatatagcagtctggtggatgaatggatggatgaatggatgaactcagcggatagactaatgattgagtaaatgaatgaataaacaagcaaatgcacaaagtatatgtgcccggtgtatttctaccacattcaggttgacttggtgataaatcaaatatatcagaatgcagattcacaaggtcacgccaatcaacccacactgactaacccctgggtacaaagcactgaggccatgtggtcattgctgcctccatggaatggtcttgatccaactgaccagtctataaaggttcccaaaccaacacagaggcactggatccagcaaagcctaggagctttcctgcctcatatcaccaccttgccagagttgaatgaatgaatggcaggaatgaataaatgagctctataccaaaaggaaattaaaatgttccaatgtaagtataggagactcttgtttccccttaggcagagatttaatacatattcttatcctccatctccctcccgctccctctatccttccttccctctctcgctctctctctctttcacacacatacacacacactcatctactcactcactgccttctaggaagctgtgatggacaagacaattctctatagttctgcccaagggaaccagtcactcagcataccaagaaaagtcagagagaatactatcggggggtctgatgtgtcagagaggacaagatgcccaagttttggatggttagaaaggaaagctgcgagatagtggagaagatgcattccatggtgtttgctgaaaaccaaaattctgttttacagcatgaggttcctgtggcttcttacctactcagagtcatacaacagtttaggcagagaggtagagtctggtctcagatccggcacctatggataatgctgagctagctccctgcttccttgtgtacatagctgttgacctggtgcagtgaagaaggccttgggcagtcaggctttgccaaatctgattctatgtcataccatttgatgacactgtcctccttatgtaaagacgacctgggaacatcaacgtggggtcccttcataactggggaaacagattctaagggaagtatcaaggatggaagattagaaaacaaggagtccctaagaacccacacgtattatcaataaccacaaatgccaacagcagagcaggaagtgttgctggggaccaagaggcaaaaactagagctctgttgggaggcagtgccagggactttgccagagggagctaatttttatagtatctttcaggagcagtgatgtcctaaaggccccactttccctattataaaagtattctcccaaacataaattctgaatcctcatctcagacaacactaaaggtggcttcaaccttctattcaacaacagcaaagatgctcttacccgagctgtctgaccagcttcttcttgggctccttcccctgatgatttccactccaaacctcaccttctatgcttaaaaaggccataagcactttacattaaaaaaggccatttggggctgggcacagtggctcacacctgtaattccaacactttgagttgctctggcgggcagatcacttgagcccaggggttcaagaccggcctgagccacatggcaagaccccatcactataaaaaatttaaacaattagccaggcatggtggcacatgacatgcctctagtctcagctactcaggaggctgaggtgggaggattgcatgaatccgggagcctgaggcttcagtgagccaagatcataccactgcactccaggctgggcaacagagcaagaccgcatctcaaaaaaaaaaaaaaaaaaaaaagagagagagagcatttgggattaactggaattccaaacccttctttcatgctctcttggagactggaaggcaagggaagtagaaatcaaaagggcagggccctgagatggggtcctgttaggcagatgcccagttcttggaagaagtcaagctctgtggtaaggctagactcaggctctgtgtgtcctggggcctcactggaaccatgtctgggcaaacaaccattgtggaatgaatgagtaggaatgagtaggtagggggcatccctgccttatcaccccaccccatgccatcatcacctttccccctcctggggtagggcagtcaatgtggaccctataaggagctttgtaggacctggctaatcccaggcatctggtccccagatgagaggtctgttttagttatttcttaggccctagttcccaaagcctcctcatcccccatttcctatcccagctgctttttctaactgaataaatccactgttgtcatggagacaacacagtatcagcatctctgttttttttttttttttttttgtaggtccttccaaaaaccagaacttcctagaaagggtcctacttctacctccctagtatttctggcatgggagtcttctctgataaaatatggtttgatgtttggagtatctgccttgcccataagatttcctaccctctttgtagttttaccttgcccaagttttacctctatccttagcacgctgagcttaatttgacttctttcagccaaggatcctgagtttcagcacacttccaacactgggattatttaataaagacggcagttacaggggctggatggctcttcatgcaaaagggcagacataattctccccatgtcatagataaacaatcgtagctccaagaggccgggtggcttcagcaaggtcacccatcatagaagagcaaagccagggccctctgcagcttttccatgcaagcactgccaccttcagtggggtctgcatctagacactgagcatggtaactaccactattgagcaccagctgtgtgcaagtcagtatgtacagacatcacgtaagcctcagaacaaccttgtgaaatggatatcaatgtcaccattttacagagaaggaaactaaagctcaagaaagtccagcatcttacttagtgtcatacagctgataagcacagaagctggattggaaactgagggctgtccccttcaaagtgcaaaaccagtacaaaatatggcctctacctgaaaacaggtttcaggagcagtcactgccccagcactcatccaagggttgaattccactgtatggggccagaagtttcttttcatattgtcctctcccctttgactcctgcaggacctctgctgagtttttatgaatgaggaggaaaaaaaatgtcattgaaaagttcaaccaactttggtctcctctctctgagtgatagataggtttaattactctgaattactcaaccactctactcttctcccccaagtcattaaaaatagattttctctttgaactgcactccgccctcaggtctccagatagtcaggagttcttaggagacagcaccggggtcagcttctggtcagaaggttgtgcattgctttagttgcaatcacagtctccggaacctccagctgtttttctggggtttttgtgcctctttttccttaatggtgttgatcacgtgactttcacagcccagaggacaggcaggaggctgggttggtatttactttatgagaatttaaggggatctgaatgcatgactattgattgttaaagaaatggatctaacactgagaacaaacaataatgagttcttcacattaattactgtgaagctgattcataggaaaaacctaagctgaaagtgtgggctcagaggtgttctgcttcctgatgagccccagagataggtgggacagatattgtctttatctcaaaataaggagatgagggcttgaggcataaccggagtgcccatggcgacacagctgatcactggcaagaccgggacagaaaacttctgctgcggccactacccaagctgtgctaacagagggcttggtgacattttgtaggaagctcagatggaaaacgtggagcctgctcacagcctcttccattatcgttctggtcctagtaagcttaaaaacagaagtccagccaggtgcaaaggctcacacctgtaatcccaacattttaggagccagaggtaggagagcccttgagcccaggagtttttgactagcctgggaaacatagggagattctgtctctccaaaaaaaataaattaaattaaattaaattaattagccaggtgtggtggcacacacctgtagtccagctactcaggagggctgaggcaagagaatccgttgagcccgggaggtagagactgcagtgagctgtgattgcaccactgtactcctgcctgggtgacagaacaagactgtcgtttaaaaaaaaatcccttagggaatctttcacccttcccaatctatgtccctcttcaccttctggtatcacctctcttgctgtctggctcctgattcacccagctgaatcactgttagaaaacagaggggagtaaaatgagctaagagatttgcagtggtcaggcgggtgaacctgacctgcagtgtccagcagcttgactaggaagcagaaagatgttctttctaggaagaagaatggccccggtggccgcttttggggcagctccaggagaaggggccttccctctgcagtccttgcctctgtctgtctggaccccgctgcatctgtgtgggaattaaacaaacttagacaccaattttgtttctgttaccctacaaaggatatgaccttacctgcgttacttaagctgacactcagttttctaataggtaaaatgggactaagaatacctccctggaaaggttggtgtaaggattaaatgaggtaatctatgtgacgtgcctggcatgcggtaaatactggatacatgcagctgttgttattattgttcctgctgcttcaatccattcaacaagctcggtccactgcccagctcagggcaaggtggggccagccaggagcctgccagctgtcaggagacctcagtgcccatcacttcccccagaaccttaggcagcagatccaaagggacatgatttccttgctgcctccctcacctgctcccagcaggggagattgagattaaggtgttgcttcaggcatccagtagacatcagctctttcctgctgaaggacagaaagtggtgtgggaatttttctttggagacttgctgagccaaaggggatggagtaagaggcatgtcaggagggagggggcctggactttccccagagggtctaccttggcttctctgcctgagagaataaggccagggtcaggggcaggactgggcctccccaaacattggcccacatttctctccctgtgaggactctgaatgagtgtcaagggaaggatagtacactaggctgccaggcagaaaatctacagaaaatcaacatctccatgttaattgcacccatttacagaagggcttacaagatttggtgcaagcctgtgaagaagaaaaactccacccacccatttattccatcagttaacagctactgggtactaggagctgtagggtgcagagaagcagaagcctcacctgccttcaggttgcttcaagcctcctgatccccgctctgctcttgcctcggatctcgcagtggactcctgggccaccttctccctcctcatccttcagaaagagcccttgcagtatatctgagaagagcgaacagtcagtcccatcatgggccgtggaggattctcctccagttggccactttgccactcactgcaagtgaggacttaagcgctctttgggggccttaatttctcagtagatccagtgaaaatcataacacataacaatacctgtcctctcttcctctctggggagttgtgcagatcaaatgagataatgtgtgtgaaagcatttcaaaaatgccaaaaccctctgccaggattgctgtgactgcgttattgatctctgtccatacagcagccccagcaggggtctctcttcaatccaccatcagctgtgtgtgtaaatgagtgtcagatcttttcttgaaaacaggtttggattgggggaaagagaagaaagtggctctgagaccctataaacctgaaggggtgaaggggtgggcctgcagggagggaccaccaagagaaggtaaaaaggaaaggagagaggcccagggagccagctccatcagcttcagctgctgtgtgctctgccctgagccctgaggaccaggaggctgttgatgaggccaactggtgctccattcgggcatctgtgccacctcccacccctgccacctggctcccagccactgagaaggcctctgtttcttcccttgtgtcaggagcaggggacacgtgtgaggacaggtgtaccatctggcagggcagattccagggaagattccagggaagattccagggaagaaagagattaaattctcaatcttggaggggcccaccagcctggggaacaattttcccttgttcctttcatccctctgtgtctctcttgcatgattgcaaagaaatcttgcagatcgcttgaacactgagtgctcctgccagagccccctgaggtgagctgccactctctgtcctctgagccacgacggtcctggttctacttctattgtggcatctgtcctaccatattgagattatctatttccttggttttgttctcaactgaaccatgggctccaggagggaagagaatgtagccctgatgcctaacagagggttgagtacaatgtaagtgctcagtagatgtttaaggactaaatgggcctccggcatgatccactgtcagaatcatgtgaggttttctgctttcacctcaggcgtttctccagaagagccatagaagagctcagaaccatgtgggtccttccaggtgtccatatagggtggcagagatgcagtgttgattctctgtccccaggctcacttggcaaagggcgcttgttcttatgcctaccattgggaaactcttctgtggaaagggtgatgtgtctgctcctgatgggagtaactgcccaggggctctgtccaggatgactcactcttagggcctctgaggctttcctggccttaccttggatggtccaaacactacaggtgtgccatgcttttcaagaccttcaggaaagaggctgggtccagtggcttccctcagtgacttgtccccactgcctctaataattatctgataatgtgtctggctatactgggcctgacactctgtgggctactcgtgtgctgaattgagagagttggtcagggaaggaaaactgccccacactctgcactccctgccaagtccctcccacatgtatcttcagccccgctgaatcaggccaaggaaggcaccagagacgcggggccccggggccaggagagccaagaacacagtgtgagtcacctttaaataagagtatttcttaagtaaatgacttaacaggacagttatattcattaaaggtgtaattacaagccataagatcaagcagaaaagaatgtcaagcatgagggtggaatccagtttgaagcagcactgcgggtcctggggagaaggccatagggggcaggagaagggcctcccattgtataattcccattgccacactcacctgccagcccagccacccccagatcccagcactcagagtggagggggccaaggagcctcaggcataattaaaatgcaataatagtaaacaaatgctaattaaagtgtcatagagtgtcccgttaaactctgagtcagccctgacagagggcgcccgacgcggtggacactctccaggagaaagctccctttccttcttgagtttctgaagacatctccctccccacccgacccagccctagaacaagtgctgggctgtcacctgggctacaaagtgaagtggctcctgactgcggaggcttgaacttggtcctttatggacttcatagatgcagaatgattagaaccaatttctcactgggcataaagtagtccccagagcactgttgccttcccctacacccctaaaatccctctaattccttccatagcaccaaggaagagtgatattctgtttcttcctggccccaggacctaacatttaaaaagacccactcggagagctggagtcatctatatcagtggttggcctgcgtaagaatcggttggagagttgttaagacccatttcctggacctcttccccagtgtttctgatttagtgcaccctggattttcatgttcagtaatctcacacgtgacaccaatggtgctggtttgagaaccatacactgagggccattgctccttgagggccccagacctgcctcatggaggacattgttttggccaaggctagaaggcttggaggcatcacatattccagctctgtggtctttgcagttcttcccatggtcacccagactcacatatccagacttgcaccatccctcccttgccctcaccaaaggtgtttgaagaaaccctgctttccagtgtctgcttatatggttctttccacctggaatgctcttcatctgtctaaatattcttcaccttttaaggcccggacacatactgtgtatactccgtttagggcagcactgtcagatagaaataaaatatgagccacaagcatgaactacatgtgtaattttaacttttctagtagccacatttcaaaaaggaagaagaacaggtgaaattaataatacatttaattcaagataagcaaaatatctcttcaacatgtcaataaaaattattgatgtaattttttcccttttttcttttcctctctaaatcttccaaatccagtgtgtattgtagacttacagtacatcttaatttgtcctagctacatttcaaactcaatagccgcatgaagctagtggctattgtactgggcagcacagatgcaggcagtgttttctcgttgctctgaattccctcagccctctttgaatacttgtcttagaacacgtatcgctttcttctttttattgctagcctgttcgcaacttgaaggtgctagttgtgttttaatgctgtcgttgtttttattctgaagtgcctagcactggcctggatggaggacacaatcaatgaatattgactgacaaatgaatatagaagcacatgaatataagagacagaggaggctcctgggaacatctgactttgagggtctccacccggtcactgtgacatttctttcctctggtttgtgtgtggctgttacatcttagaggacagaataattcaagttttagaccaccccccctccacccctgccaacttacaagtttcctgtttcactttgctcttcaactcagtgcattaaaaaaaaaaaaaaaatcaccaggagggcccaggaaacaggaaaaatagttgtgctattggtttcatgtttggagaagaacagggtttcactatctccgtggcacttggcgtgaaagtgggctttgttgctggagacactgctcccattcagggccccttttcccagctgctgagggctgggctgtgttttgacagacgggccgaatgcaatgcagacagttgttttaatttgcagccagatgcagacatccctcacaaggagcccgaaacccaagaaaaggaggctaggcactggaccaccattctcaggcctcagagagtggtttggagggggccagcggaagcctcccaggcagccagcgtctctgttatcccagagggctgatagtcaccaggcctgggagacgtacactagaaggtctccggcagatacctgtctgaaaggtgtttcttgtaggcatcgtgggccatgaggcagggttcaagggttattctttaaggcggtgtgaattggtggtggtggtggtggctgcatgttatcttttaactgtagagttgtacaggacaaaaatcatcaacagtctcaaggaggagttagggaaactgtgggaaatagaaggctggaatgtcagaattggcagggactaatgtagccttcctctgagggcagaaatcctttcttccagcctttgggacgaatgtcaccttgactgcttatgcatccctgtgataggcgttcctttggaaagccaggcggttgcatgatgttgagcttttctgagcttttcacccatgagtcccactgcagccatactgctccccttcgaacactggaaaacagcctgcatgactactttgagactcttcattggactaaataaacatcccaggttcatctgctgcatcccaccccatcctggccaccctccgggaaggatctctggttgagcaacgcctctcctagggcaggctgcggagacctgaactccggactccacagtggggggtggcttctctcgaccctgatgctgtgtgtctatttatgcagcccatggtcagattagcttctttcgttatcacctcaccctatcaggtcacatcagattttgagttgagttgactttgagtcaactcaaacccttaggtctatcacacttgaactatttcaaatcagctatcccccgtcttaaacttatagtaccagtcttttttaaagctaaattgcaagattttacactcatctccctgcatttcatgtttttattattaaagggaggtgagggatgtttaaagctgatcatgtcactgacttacagaaaagcctcatatatgcaatgttaagtgtgatgatgtaggaaggatgggtggggacacccaagagaggaaaggcaggctcatctctctcccctcccacccactgtacaccctacacttaagtttatactgaacttatccatgatcgctttcgctcatcacaatccttcagattggcatgtctttccaggtctctgcatctgaccccctcttacccttcaaggcacccctacaccactggtcacctcttcgctaagttccccaaaccttcagcactcacagcaatcccacacaacaaaaactcagcacaatgtagagcaagtctcggtttgtcattaccaactcccactggaccgtagggttctgggagggcagaatctgtgtgctgttcgctgtcgtttctctgttgcatagcaccagagctccacagcgttgacatctgataaacatttgctgagtgaacagtgttaggatccatcctgaacctctcaggaggatgccgtggagatgtctccgtcatatcttttgtccccctgccagaggcagaacactgtgctactggaccacaggttatgtttttactttttacacatctggtaggtgggggacctctatgccctaacaaataagaacccattcccagcacagcaaatgtttttgcagcccagcagcctcctgccccagccagcaacagatacctaggacatatcaactggaacacttcagtcctctggcccccttgcctggtctttattttcacccctgctgtgcaagtaggggtgagtaatatccagacaggcccagctcaagcccctgcagggccccagcagaagaccaggaggagtgtgcaagggctacactctctggggggcagggtcttgatctacaaattcccactttccaggcaagactgaatcaggcagctcttttctgtggatgttcccatttagccagacttttcaaaggatgggagatttactagagaaactgaatgcagacatcagagaatgggataattggatccaggtggtatatttggttggctgtaaagagtctgtaccatactatgaatattatttgatgggaaaagtttctcctttccctttttgaatgttttctgtgtaggcaggatgtctcagcccaagcccagctgaaagctcttcagagatgagtttgtgccactcaatagcctttcaacagagttaaccattttcagtacttgccactggcttgcccagctctcgggaggatgctagtggagggcagaaatagatggagcctttgctgctacctctcgcgaaggcaagaagtcttagggctgccactcagagacacactcggcttagcctacctgccttatgcaggtaaagagattggggacattgaggccatgacttgccgcccagtatcacctctttaggggagttgacagtgcaagtgtgagtacacacaggactgtgtgacacacacctgctagtcgtcacagcctaacctcactgtaccctctttgctctctctgccaggtcaccagggtccccgtggagtcatgtgagcagtatacgacttgtggggagtgcctgagctctggggaccctcactgtggctggtgtgccctgcacaacatgtaagtttggggtatactggaaaagggtttggcatgcagaagaccggggctttccgggaatgatgggatatgacagtactttgcagagagagagaggaattgtcctcttcagagcagtaattctaatcgtggcttcagtgttgagagcaggaagaggcaaagaggccatgggtgggccttctttctaagtgcagggtctttgcctctcttcttccattttacttccaaattcagcccttcagctgctctgaagtgaggtgcttatatccttgtgtctttgaaagaactcacaagggatactgtagtctttaggtttccccaaaacttcttcagtgtagcctgaaatgggtgcccctctgtgccaagagtgtgcagatggtggtgcactggcattgggaggtttagactccagctagctgctgtgtgaccctggatgggtcccctgacaactccaggcctctgtttctccattgctgtttagggaaaatgcctatttcacaggtgaattgtgaagactgaatgaaataataaatgctttggtaataaggaagcccagaaaaggctacacaaatcagaataattatcatggaccctatacccttgggaggacccttctggtctcattattttatgattctaagaagttcacatctcacttcaactggcctcatgatctgccgttgaataccaactcaatataaatgctaaatcacacttaaacttcctaatttgaagagccccaggggaagagaaagggtgaaaaccccgaaagacaggagctggctaggaattctgttgcccaatggagttggaaactccagggctccatgccagctagcaaagcatctccatgaaatgagctgggtttggggtggaggcggaggcggagggccagagttcagggtcctgcacaatagctcttggcttccagcctctgcggcaggtgttgggagggctctggagggagggagggaagctggtgcctcacagatgcaaaatctggactggatttgagcccgtgaatactgggttccctgcttgggttttggaggtaaaagactgctcagaaagttttgcagaaatgctcttagcagacctggacagtgtgtctccatttaggtcagacaagtggtaaagatgctaatgttgtgccccagaatggcaaaagggggtaaatcttggttccctgcagtgaggctgacccaccagccagcaggcagggtctttcctcgagagaatttctttctccaaagaacctgacagcctgctgccagctctgtgcaaagggccctgggcagcctgccctctagctctgcagtggtcatgtccagcggtacctcctactccccatgcctccgccactctgtcctcccagcttcagtgcctgtggcacttctcccatgtcgaacacaccaaaattatagatcggggattatcatttattcaacagcaaggacgtctgttttccccatcttgaacaagtgcctatagatctatcagcaatgcctgggcctccccgctgccgcaaaccacctggtcttcctcctggtgcaggtcagccgtgactgctggaattagccacatcagaatagtcccaggtttcctctgtccccttaactccttaactctttagagaatcctccctacctaccaggacactcatctcccagcttctccgccccaagagctcgcggagaacaagatttttgctgtttatacccagaggtttctctgcatctggtcattctcttcttcaccagaccctcctgcagtgctctcccacctgccaagcagcagcctggtatcaggcgtgaggagatgggggaagctgcagctcccgggtccccacggtggcctctttaatggaggccgagggctgaggagcctctgaggggttggggggaattgaagccttcctgtctcttctgtatgccttgctcttgcaagtgtgttattgtctccaaggctatttatctctgttagggctgttgccataaatagtatgataaaaaagagccatttcagtgagtcaatgagataaaggctccagtcaagagctcactttagagctatcttaaggattcacttaaacctcaataattcttttctttgacagcattcatatttagatccattatgtgcctgaaaaggaagagggggaggagtttggagggagttagggtgcgaatcactgcttgattgtggaatcactagtgtcccgatggctatttggtttggacacgctggcaccagccgtggagcgggtttccatgtgacaaggcagacagtaacctgaagctcccgagtgctggtgtcacctgcccacctgctactgtgggcaggggagcctagagcccgagatgaagatgttgggagaaacaaccaaacaagctttctgacagaggcagccctggctgcagcgccttgtctgtctctctgtctcaaggcattatttcgtgacacaaacatttatttaaaatataccatgtgacaggtagaatatcccaatgaataaaacatggccactgccttcaaatagccattaatccacccacaagatcatatgcacactgtcccacactgccaagaccctctcctattttcttaaaaatttctctggaggaaaatgataatatgaatcattatcagcatcattaatattaatattataagggctaacactgtcatggcacctactatgcgccaggccattttctaagcactaactcctttaattcttacaccaaccctgtgaaataggtattatcatcctcctcctccttttttttttctttgagataaggtctcactgtgtcacccaggtgagagtgtagtggtgcaatcacagctcactacagcgctcaagtaatctaaccaactcagcctcttgagtaactggaactagaggcgtgtgccaccatacccagctaatttttttttttagaatggggtcccactatgttgcccaggttggtcttgaactcataggctcaagcaatcctcctcatcttagcctcccaaagtgctgggattacaggtgtgagccaccatgcctggccaatccttattttttttttacagttgaggaaactgaggcagagagagattaagtagtttgtccaaggggtcgcagctagtaggtaacaggtctgaggttggaacccaggctctttggccccaaagttcatttgcttttccatggctgtgctgcttctcaggtcccacaggctgccctcactctgtggtctcagcatcccacagtgctgtaaagagtcattctagggccaggtgcggtggctcacacctgtaatctcagcactttgggagactgacgcaggtggatcacgagatcaggagtttgagaccatcctggccaagatggtgaaaccccgtctctactaaaaatataaaaattagccgggcacggtggtgggcgcctgtaatcccagatactcaggaggctgggacaggagaattgcctgaacccgggaggtggagttttcagtgagctgagaccctgccactgcactccagcttaggcaacagagcaagactctgtctcaaaaaaacaaacaaacaaaaataacagagtcattctgaggcaggaaaacagggtctggaggcagggaacataaggctgattcacacttcagctctgacagaaaatatcctctccataggcgtacactggctgtaaatgactttgtaactttacttcatcctcttcatttacataagacatactccaagcagagggtatttaaactcccccaaaattctataacagggcctttgagcccctatgctcaggcccgctcccgcactgtggagtgaactttcattttcaataaatcccttcattccttccttgctttgtttgtgcgttttgtccaattctttgttcaagacatcaagaacctgaacaccctccactgttaattctttgtgtcgaaactggatctctcatgttggggattaatcctcttccctctcagtctgtccttaactgcgacggagactgtctgagagtcaccaaggccctccggagtacagtaaaagtcttcttgagaagacaggacacaggcctcagggcagcaaactcccatcctgcccaggggacaatggagccaaacagatgggtcccagaggcctgacctcttgtgaatctgtgtttatggcaggtgctcccgcagggacaaatgccaacaggcctgggaacctaatcgatttgctgccagcatcagccagtgtgtgagccttgcagtgcatcccagcagcatctcagtatctgagcacagccggttggtaagtaactcatccaggggcatggggagagggaatacagtgcatgcacctgtgtgggtgtgctccattcacgcttgcacaagtatctgtaaattgatcagactttaaatccagtaaggagactttatgtttatagcaaacgtatggcaatgcctattgtaaagggcatagtcattctccagtttccctgcaaattcattacccattgatctgttttgtaaatctagatttttgcatttagtaacaaacatctgcaacataatgcagtccaataccaaataacacattctttagtatctgctgcatttacaattctccactcactgcactcttaaagaaatctgtgagttgcatgtgtgtgtgtgtgtgtgtgtgtgtgtgtgtgtgtgtgtgagagagagagagagagagagagaggaaagaataagagcaagaaagagactgcctcaattcgaagtcagtgtatgcttaaagagaatattaaagagaataaaatagcccttaactatctatcaaggtacaacccaaaatatttcatgtcctcaggccctgcattattatttcattctgaaggttttatgagcattcacgaatgttaattagttaatgaaccttccaagatttcagttcattcatccccaccaggagcttttggctccaagggagctgaggaaacaaacaggggagtttgtacctaagtctcttggccccatggaaacgaaactggggcagagattcagcagcaaacaaatgtatggaaaggttaggtgatgcccactgagactgagaaacccactgcaaataacaccactgggtattgataggaagatagagggaaacctacaggctgggcgcggtggctcacgcctgtaatcctagcactttgggaggctgaggtggagagggttgcttgagcccagaagctcaagactagcctgggcaacatagtgagaccctgtctttactaaaaatttaaaaaataaaacaaagggaaacctacctacgccatcatggtcctcagcttggaggccaccgagatgtcatcaccatgaaccctatgggcacacctcatgggcagaggaaaccagtcgcctttcttacctattcaaataccacttagatgctgtattgtggtaatttgagtacaaactcatttaaaagtgcaatggatttagagcagcattttgccattgaatattttctcaatcgacagattcctcagagagtctgtgatatttttactgttaaaagtagggtcttcaaattcaaaaaagctgaaaaccgctggcctagatgattggaacccataggtaatagcagacatcaagcagttggtggccacttctctgatcccctgagctccttatgaacctactggtccatttcaagggagctgctagagaacagagagcccacatggaacagagaagcacaaactctagggaacacgcagcctttagaagcagcctcttgatgaatgacagccaaggtgaggagctagctatcttccaccaacctagtgagctcctggtaaacctccaggttggtgatatttactcccatgagccatggctaaggccttgtctgtgaagggctcggctcaggacttgctttcaagtttgtgtggtgccttgcaattaattttcatgtcaaaatgaacaggggcttagatggattttggtacctttccctctagcgcccccacccctagggctttctaatgctggagaagatggaaacattaattaataataatattaataaagaccattgaccctacacacattgaataattaatgactgtaacttcagtgttcaaagctggaagaccacttagaccaacatccttcttttatagatgaggtcaggggagatcagtgagcaaagtgggtcacagcagggctggacctggagtccaggtctcctgaggcatttctttggcatcatctctttgctcctcccacagcttagcctggtagtgagtgatgctcctgatctatctgcgggtatcgcctgtgcctttgggaacctgacagaggtggaggggcaggtgtccgggagccaggtcatctgcatctcacctgggcccaaggatgtccctgtcatcccgctggatcaaggtaagaaatatctgccatgagagccacaaatgaggggcttctctatactgagggagctgggggtcacaagaactaggcacacagtcttcttataccagatactaatattggcttagacaacttgtttacgtttgaaagcaaactgtcatgccccaaagtgaatttcaggaaagaaaacacttgctccactttgagttaaggctgcacagaacacagcgtctttccagatagcccgtccctcctaggaatggagtggcttccatcagtagttttttagcaggtctctccacagaactgggggctcagacctaatatttctgaaatcctttcagtaatggaacatgactgacaaaggcaaggggctccgtggaatctgcttcttcctccctgcaggcagaggaagtctgggtctgaggggtgggctggtatttacccaaagaggcttccttgggaggagaagagacgattcaggcaggttccacatagtatctacatcctaagagagccctgtggtggcttcatgacttacattttatttttgtggctgtccactgggtcccccacgttgttacccaaccccatccttttttgtttgtttttccagactggtttgggctggagctacagctgaggtccaaggagacagggaagatatttgtcagcaccgagttcaagttttacaactgcagtgcccaccaactgtaagtgcttattagaaagggtcttgctctgggtctggatgtgggtatgggctttcttcccctcgatgctaagctcctttagggcaggaaccacgttgtagtcacctcacagtttccccatggggcctgacactttgtttggacagagtacactgtacataaatactaccatattaaaccaaatggtatttactctctatagtctctgaatccttggatgccaccccaacacacctaacccccaactctcaggccaagatagtaaaaagagagtcagagaacaggaaccgtaaaaaaagttcttcattttccatcacttggtggtgactttgaaggtagaggctgacagtgagtggagtatggacatgtcacccacaaccagatgaagagggactccgagatagcgactcggctatgcacacagtcacccacagaggaggagcagggaagggggaaagtagcctctctcagcacatgataaaaagacctggatggggaggtggagcagaggccttcactccatcattttttaaatccatccttcaatattttcaagaggaagggaaaccagacaggccaaaccacagccttcagtggggcttgactttagttctacggacctcaccagccattccagcagctgaatgcctgccagttggtgcccacacgctatgagaccccacaactgtgtgagaagctgggaacatttcacagggaaaaagcagaaatggagggagtgaaacccctacttagtttctgctgatcctccctggtagagaaactgagaccctttccacagaagctgggaactcatacaccatttggtttagaaagaaggaaacacaggcctctgtaatagagccacataagggtcataggaccaaaaaccctagacattcagcaaggggagaggtcaatcaacagctccatatcagaggaggcagtgattcggaatgtttacggactcatccttcccattgtccaaggcaggaaccacttgggatccacatcatagtcaggtcttcaggggtatccagtctgtagggtccaagctatgggcatgaaggactcagcaatcaagatgggaagagggtctgtttgcagctaaaccctaaaggaatctttagtcattagaagaggcaaataagctagtcctccttattctccatttttctgaacttgattttcataattagaataatcttctggagttctttggtctctacattagtcaaggaaggagccccattgggacaaataaatagatgtgctgagaaagacagaacaagtgatagaaatggcctggtgggaaccagggagggcagaaagggactgaagttgaaatagacaaagctgccctctaaccactgcatttgaatcccagcaaaccctgctttggaaatggcaagcatctgggcaacagaacttcttacctccttctcaaactccaacatggtggtgatggaatccattgtttgtgagagcaatcttatctccatggcaacagagtatgatgtcaccactttcaaagatgtattgctatggcaacacagatgctgtcacaggcagcaagttttaacagaaaaaaaaaaagcaggtctccttgacagcaaagattccattttaatgccaaacactgcctctcttgcccttctctactggaattcagttaaaattcatggaatcaagtatagtcccctccttttaataatttgctgtaataaaagtaaactgaggcccacagaaagattagtgctacaatgaaggtcacaaaagtagccagcggaagagccacatctagctagagccccaataaccatcctccttaggcccttggtccattttcattatttacttgctgaatcataagatgttaccaagaaccagtctatctgagagtacatgagatagcatgaagctcagaaactaaaaaagtctgggcaatggagaatgggataaaaatgctctgaatgggaagatgaagtgtaaatgggctaaccaacccaacatactatggcctgtgagccggtgacccctggatcaagccccaaccacccaaatgtaatcagagccccaccaggtggcgccagactgcagacctggtcctgtccattccaggttggcctagttgtgaaagactagatagagtaagggggctgcgaggaggagcaagactaatcccccctacaaaacccatttccattacaatgacctgatcacacacagagagccaaaagaatatacacagtctccaggtgaaattggaaggaaagaagtgctcaccctggcaagaaaagcacataccacacacatatcctactgttccatgcctgggggagtgggacaaagttactacttaatactattagctcccccaagcccaataatacagatgatatgaaccaattgttaacactcaaatgttatttaagaggttgaaataacaggtaatttaagcgcttgacaataatactcacatttagcatggcatttttcgaaaccattttctatacattatctcatttgacaccaaacagccctgtggcatagacaggaatgttttattacaggcggatgaagatactccaattcagagggtgaagtgacttactcagtgtgaccccagtggcagtggcagaagcaagtctataatcagatatgcccaattcctgtccctgtactctgccggctaccctgtctttacaagcagtgaaatattgggaactgtttagctaccagcattcagaagaaaacctagtttgcagcattgccaaattctgtggcgcaactatttccaccatggccgatttcaaactaccaccatgatgtctatcagcttgcaaaattcctgaaaatgtgaataatcagttctcatgagcttatagaagcacacccctgctttgtaagttatactcttatctggtctcattttctttccaattttctgttcccatgaatatcatggatggagaatccacaattcttggtgctagaggatggcccaccagtcttccctcctgagaatgagactaggatttaaacacaggttaacagacttctatcatgacacatgccaccttccctctttgttctcttctctttgcctctcaccatctctgtccttgcaggtgcctgtcctgtgtcaacagcgccttccgctgccattggtgcaagtaccgcaacctctgcactcatgaccccaccacctgctccttccaggagggccggatcaatatttcagaggtaagaagggcttaccctaacatggcagtgttcccagtgagtctgagtggcccctccctctttagatggtcagtccaatggcttggccattttcttgccctggcccatcttggccgtcttgccagaaattctgcatgctagaaagccctgttattataaagctcaaaaaagtagcagcaaatgaccccagaggcagaggctatgtctactagactcctaagactctatgcattcaaaagcttgaaggtaactgggggttgagactgaaagcttagaggaaacatattcaaccaaacagactccctggtctagaagagtgtagtgaatggcatttattctttgagtctagccctttgcttggctgcagacatagtctagttcaatagaactttcactcgcaaccattctttcatgccaacttctcttccaactctaaaattcaatgattctttgactctgatgtataactgggtgggtggccttgtagaaagtgagaaaaaatcagctagtgaaaagaaacaggcattgctaaaagtcctgttttattatacagtcgaaactccatccctaaagcctgacccacctttgttattaacacagtgaaatatcaaattgcttatctttctaatgggtattccattcaatggttattcactgaagtctactttcttatatattcatagcatgtctcaggacagtgaagcctgcttgctcagtctccctttcttgtgtcgaaagcttttcataccccagcatggccagttggatttgaacaactatagagacattacatagttgcccaaatgcacgtgtgcatatacacatatttcttactctatattttagaaaatccaaaaatggtaataagtgacaatgtagcatttttatatacaactacagtcttttttttttttttttttgatatgaagtctcgctctatcgccaggctggagtgcaatggcgtgatctccgctcactgcaacctctgcctcccgggttcaagcaattctcctgcctcagccacctgagtagctgggactacaggggcatgccaccatgccagcaaatttttgtatttttagtagagacagggtttcaccatgttggccaggatggtctcgatctcttgacctcatgatccacccgcctcggcctcccaaagtgttggggttacaagtgtgagccactccgcccggcctactatagcctttctatacacatcttcctcttgcgctagactacaagctccttgaaggcaaggactacatcttatctttaaatcttcaatgtcttatttagcaaatgtttgtagaatgcatgcatgaaagaatggatgaacgaatgacctttctatttaaatcccattgatggcaattgtgtcaacttgtctaagatttcaagtaatggagtcttgtgtcttctaatcttgatagcagtgctggttgcttccatggctaaacataagaaaatagactctgaaaggtttctcaaacacatacccctttgaactcttcttagtttatgaaacaacaggtgttatgttcagtcagaaaaatggaatttgcctgtcttgaaagggagaaacatagatgccacaggtggcttttcaaacagacccatctacgggtgcctcagcatgacgaaaccaggcatctagtgccctgagaacctttcagaaaagcattttcctctagccagttggtatgctttgatgcagctggcctaaaaaccctacaccagccttcctggacactggagattaactccagccctggaattctgcaacagtatgaaactgctctgggggcagtcctttcacacagagctgcagggagaggtgggagtgggcaccacagcttggagccaatgaaagaatcgcttagaggggcagacctagccaggaacagcagagccaccatgggaggcctgggcaggggtgaagactgagcagtgagagagtatgagacacagtctcagaaactaaccttgacatgggccactttgaaagttccttaataaaatagattgaggtggcccccaggacacagagagattggatgaagtacaaatctagacaacaaagagcagctgctccactttctcctgaggctacccacctcaggccaagagaaacccaaagccaagcctgaaagtgacctgcagctgaagcaagggcatgcgagtgtcactcaaagcaagataaataaactctgctggggtgtgtgtggaggccagagagctgagcccctgcaggctaattggaagcaggcccggccttcctcacaccattcggaagtcactgaaatacagctccctctcagccatggatgagagattcaacattccggagctgggccaagagaagctgttgcctccctgcaactcgggattaaattaataccaaaagggacctaggggcaaactcagagactccccacctcctttttgtttcattttctgtccttgatgtctgtggcttagggttagagaagagcagtcccctttgtctcccttcatctccccattgccctgagaaggaatggtgtacggctgctctcttatgctcgtgtgcattggtccctggcatggccccagggattggctgtccggaggactgtgagggaagcccagactccatccagctcccaactttgctcaggaaaggaaacagggtgcagattcccagcgaggttgccagggccacttccggggcttcctaaaatactgctttggctcttaaccacagctggccacatgttccttttcagcaaacagcagccaggcccccctcttttctgtccaaagttctgctttaggagaaccccatccctgaaaatttgaggaacagcaaagatgcacatgcccaacttgggtaaggtttcccttactctctcaggcgtcccagctgatattttcatgtagtttggggaactagaatcccctggatttccagctaactggaaatcccttagctatctctttaggggttcctagaatatctcttttagaattccagtaagcctcccttcccaactttgaatcaaaattttatgtctgtctgcttcctagaaacaatatataactgattagctccattgattaatatagcaacattaatatatcacacatttataatttcttcacatgtgccaggagttctcaaagtgtgcccagggaccggcagcatcagcatcacctgggaacttatagaaattcaaattcttgggccccatcccagatgaggctaaagattgagaaccactgacatttggcatttcaatggattcttgcaacagccctgcaatttcatataatttatatttgacatctgtagtaaccagaatgctaaaaatttcgggtttttgcccaaggctacagagaactcaggcatccaaaaaagctgagtacagtatgttttctacagaaaatcagggcccatgagctttgtttccatggtcacagccacacttgctggcctgacttcaacctggtcctttgctattggtcatgaggattcaggctatggatgggccagcacaaatccatctccacagatggagaaactgcccatagaagatgggtcagtggtgccatttccagataaaaagacagccagcatatgaggtaaatctgcccacatctttccagaaggcagatggaccaattccatgcttaggcttgacaatgaagaacagctgtgctagaacgaatgcaattcaaaaataaaaatattagtacttattatatatgcagcatatatataatttaaccttaagtactctatgaagtggattatattatagatgaatagactgaggcttaaataagttaaacagctttcctatgatcatcaaataaatgcagaaattaggattcagagacaatttttcaagctgaccttgaataagtgaaagtccactgattctgcagtcacactcacatgcacacacaccacaaataggcggtaatattaacaattgtcaatccagcatattaccacttacaacacacattgattttcctctttcatgcaatctaggtttgtcagatattattggcaccattttatagaggaggaaactgactttcaattaaaccatttgtcaagctctcttaaggtaatgagtcagacctttccagcactcagagcacagcagatctctgatgggggccccccagatctcttcctccctgagccagatcaggctgtgacatggtgttagcaagcgggtgtgcacgggaggatgtatggctttcagcttttaaagctcatctccctccatggctaagccaggcctagtgagatgtagatacataaatatctcctttatgccctgtcccaggggaaagatagaaccaaataaatccgattagcttcccaggatgctggctgctctctctttgaagtccagtgggtgaagataatgccatttccacatgggagaagtcgcttcagagggctaaagggtccccagcacagaacgctggcagagcacagctgaacaggtgggcaatgtgagcccaagactcatagggctcctaaaccaggtccctgctctccctgcagctgtgtttcctcttccccagcctaccgccacccctggggtattcctacaagtttaagtcttggtttaaactaagattgctgctgagaaggtgatcctggctccagttggcctagagacagaggagaaagaagatgacccaaagagatcactcagaaggctgtgaggatccgcggtagcaatcagtattttaagaatgtgaacaacagtcttaacattctgcaggaaaagcatcttaggatgatttgctttctttttcataagacaggtactgtatgtgtatgtacacatgtgtgtgcctgtgtgtgtgtgtatacccacagaagcaaacaggttggaagtggccttattgtatctgattaaacccttcaccatcctcaagccccacagatattgaagtttcaacaacttggcaattgtttggggtccagtctcctccacccactttcagcccttaccactgcaatttccacccaagattcacagatccttcatgaatatactcaccagaatcatctcataacccaaaaggcctgtatcttcccatttcccaagatgaagaaagcatacctggggcaccaaccgcttctttcctttgccttagagaatagaagggaaaaaatcctattctgtctgacctgagagcaattgccaaataaagaaacaaagcataagacattctttttctactagggcaatcttggggcctggttcagcatttgggaagaccctaattgttacccttacatttgattctaaaaagtctgaaacagcagaccatgggaaatttcctaaaattctagaatcccttaaaaaaaaaaaaaactcatgtaatagtactcataaagtctactcatgattctccaacctccaggctggactggacttagcccagcctaaaagatgaaagtgtgtgtgtgtgttacatatagataacatatgtgttatatataggtattacacataacatctatataaaagtatactttttttggtccacattaaaaggattcaacaatctttttttactaaccccagacatcatacttccaaaagcacatctttaagatcctgctactgaaatttgaatttgttgtctaagctcattagagatgaaaaacaactgctcgtcatttacaattcatcagctggttcggagtaagaaaatctctctctctttctctctgtctctctgtctgtctgtctgtctctctctctctctctcacacacacacacacagagagagagagagagagagagagagagagagagtgcgagagagaccattataccccagccttatttctaacttaaattctaacattagatttgatgcagatattttagctgctaacaggaagtgttatctccttttctatgagatgcctgggcttccctaaagtggtgctcatcttttttttttttttttttggctataaatatatgaaagagtctgtcaagagtgcctgcagggaatgaaagtgaaagtgcagtaaagagcaagtttatgagttggcagcttgagtgactggctcctaaacagggacccatctgttctggggttgccttgtgattctctctcgtggatgccgtgcctgcctggagtcctcacatgcaggtggccagctgacaagggatgacactggtgagcctgccggtgtgtccagaccctcttaggtgggtttctgtgcagaatttcccccagatccggctcttcagaaattgtcagtagtaaattatccttagtaaatgtggacatgccactttagaaatcatgtgactccaaaacccatgactatttccaactccagcttttgagaaccaaatgccttctcaagtctcttcaagcccagaaggcaggctttacctcatctctaaagaatctacaaagttggagctaaaaaaaaaaagattttttcacaggttgctttattttattttctatttaccctcccacaagcaatgacatgcttgacatgtccgttacatgtcaagcactggcagaaagactggggagatggaggtgagtaagatgcagcctaatcctcaagaagctcacagcccagtgaggaaagcaaatcaagaaattgtaattctgtgtgtcaaaagcaatcatgggtgaatattcataactcatcctgaagccagtgcaggggcaggggcagggacggccttgcagagaagaaactgggctgagtttgaaggctgattaagaggtaatcaattattaattctcagagaaggtgatgatttaaaaaaaccaaaaaagtaaaagaagaggtaatcaactaaaagaggggctgaagcagggcagcagcaggaggaagacaggcaggagtgtgtgtttctaatagacggaaaagcatgttcaaagggccagaggcagatcctgtaagggagagggcatctcagagttaaccatacattcagtatggctggactattatgtgcaagaaccacagagttcagagggaggtaggcaagggccagatgctgaacggcttgcaagtggggcccagagaaaagaggcaacagcccgagccacaccatgacaagaggtggccacaggagattccctgtgtgaggctgtgccggcattgcacaaggcttcttaattattgcatttgccattaggaggacaatatttttgtcattgaacatgtcctacaccttgtaggaaatccagcaatcctggcccctggcatcaatgccagtaacaccctctgcaggccctgtagcagcatcagcccccagacattcccagaagttccccctaagaaccactgcccaggagaaggggacagagaaaggggagcctcctatgagaattcccctagtgattccctgtggaggtggttcccacatcatcactgccaggggctaccaggctcatctgcccgaggagagaaggagaaagaggagattggcacagtggggtggccctttgacctctggtggaaaatcagcatctagtcatggagctccataaatcaatctgtctttctcactgtctctctctcatggtccttcccaaagcccctccctaccaagactttcttttttggttttgttttccaaagcaacatggcattcacgcagggcctggtaatgaaatgagattaaaaaaaaaaaaaaaacagagcaagtgtttagagtattgctgggagggcttgatccaccttctggaaagcctagctcagtcggggctgggaagctgaagctgctgataacggatgccccaggcatcggcatcagacaatgcaaggggccgagtatctggagctggggaacaagatgaaacccagaggtaggggtgccaggttggggacagggacacgtggaggctcttttatccagtgtctcaggagataaaatccacagcttgccacactgtgcttgaaaattaattcctgaattgtaacacacacagcagatacaggacaacttgtgggacggggatgacaatatcaaagcccaggagctaagagcgattccattttccctgcccattccacgggccttacatgaggtaatatcctgctcttgggcagctcacctgatacaagaggggcctgcctgtcccaggcacataggacagcatgaacaggggacagatggagcctcttcgtttgttcccccaggactgtccccagctggtgcccacagaggagatcttgattccagtcggggaggtaaagccaatcacccttaaggcgcgaaatctgccccagccgcagtccggccagcgaggctatgagtgtgtcctcaacatacaaggagccatccaccgggtccccgctctgcgcttcaacagctccagcgttcagtgtcagaacagctcggtaagaaaacgcaggctgggccctgcctggagcagggcttcctctcacactcgtgctggggcctcagtatggccagccctggcttccggagccttccaggttcacaggctgagcccacatccccagggatgcaggagccagccagcaccccagccgctcagccagagcagggcaggtgactggtgccagaggagacagttccgtgaggaccctcatggcagacactgagatctttgtgccctttctgaagttgattttttaaattttaaatttttttatttttaatttttgtgagtacacagtaggtgtatgtatttatgggctacatgagatgttttgatacaggcgtgcaatgtcaaataatcacatcatggacctttctgaagttgaaagagcacctctttgtcttcagtgaaacttgaaccagagcgagtcaactccaccctacaccccattccacatccccattcagggagtgaataaccaggagggtgctccacaggcaaaagctggagaagagagggacaggaagtgagatgggaggaggggaggtgggaggggaggggtaggaggaagcagtgaatttcaggagcagcaagggttaaaccaatccagaatggcagacagagagcatgaggtgtttaattataatactaaccccaagaagatctttttatctgccagctccctgtctctgactgtggggggtcagctggagatgagggaggggaggatgtgacaaaggtgttgagggaagctaattcgcctgggagagataaagggaatctgggcctcttatcagggagctgtcagattcccaggtcacaggcgcttgatagatagaatttgtaatcggtggaaggccgccaagcgcaaggggaaggcaggatgagaaagaaaagggacacaacaaagggaggcagtgggcaggggagggcgggagcagaaggctgacagtgacatgcccttcagagctgaagagtggggggtcgggaagatgccccgaggtctccatcacagggtgccaggactggccacccaggggtgttatttctgaagtgtgaaggggctaaatgtcttctgtgggatcagcacaagagagaaagtcatagactcctggccacagctagaggactttaacgatagggctgatgagatctgtgcccggaaagctgtgggctgatgaggtctgtgtccggaaagctgtgggcacttctccctagtggaccattggctaaagtaaggctcgtgcggaaatagagggccaccgcaggggttggccaggtgactgctcgatgagactctcggccttacaagagtagtaagagggcattagctctgcctctggagacacatggactttttagggagacacgtgaaaagaggcacagcagatcctggaaagtgccagtgcaagacagaaagtggcaacaccaggggatggacagtttgaggcagatctgcagggttgtgggagaggactcctggggaaagtagagctgagctgggctagaagaatacgggtgggttaaaaggatggaggttgtagggagacggttgcattccttatgagataggaactcaacaaagacagagaggggcttaagaagatgtgtttggagaaaggtagattcaaagctttccacgggagagcagtggaggagaaagctggaggagtcagtttgcatccgattatgcagggcactgaatgccaagctaggaggcttgggtgggattctcttggcattagtgactgggattcagggaaagagcgtcataataatctgagcagcatgcagggtttgtctgcatccctgacccctgtgatagagagccacatgagccccgtgcctctgcccgtctccctatagtaccagtatgatggcatggacatcagcaatctggccgtggatttcgctgtggtgtggaacggcaatttcatcattgacaaccctcaggacctgaaaggtaagcggctacttccgggtagaagtttgatcttttcacgaccccgggaaagactggggctagagggatcagagccagccagccgctgtgccatgaataatacactccctctgtcggcggaactcttcagaggatcctaaagcaacatttggagtcatcaaaggagtcctgttgggagccctgttttattacaaccagagcatccgctgggcggccgccggcccatccacgttattctttggctcctgcaggctttgaagtgtctgtggaacctgacctaggagaacagcaggcaggaacgtccggctagtttccctggaaatggagatattgtttccagtcaggctcttgttcccctgtccttggccctggtcacaatcactgcacaaagagggtttttaaggctgctctccagttcctgaggtgggcgggagagagcagcatgcagagtccagctcacatcgggagcaaagaattcaggaaggggatctggctgaagaaggaggggtgctccatgagggtgacccttattcatcgtcctataaactcatgtcgagctcctcccatgtgccagttaggcccgaccctcagtgcagcaaatgccaagattccaccctgctctcgagaatgataaaagtgactccaatatgatgaggactcgtgatgggtagacactcactaagtaatttattagagattattttccttaagcatcacaataactctgagaggtatgtactattattattctcattttctagatgaggaaactgagacccaaagagattaagaaatgggccacgagtcagatagtaagagctgggattggaaccaagacagtctaatttcagagctcgcaaactgagccacatcactgtgaggatctactacttaggccactgtaggatttaaactccttcccccctggaatatattcctatcccccacactcctcctaccctcagccacaagccttgccacacttcaagtagctagggttgtcacaagcctctgcttccacctgacggatcagccaatggagatggggtagggggcaaggccatagcaggggctgcaagtttttcagcatctttagggctgtagctccctgtcccaaatgctgccattaaaatcaaggctacttagactgggagaaaggaacggagccaggaggattatttttttctatttctcctcatacccaggccaaactttctcactgctaaaacataggagacaattaccctgctggggatctgggcttagatcccagaggttgccttagcacctggagcttagagagcagccacatccgagctgttgcatcggaaactctacttgtgactcttgcaatgttgaagaagctctgagagtgcacagacagcgttgtcttcacattcgtatcacctccacccactagcctgagtgtctctgccggctgcgcattgggctgggtggagaggaccacaccatttaaagactcaggttctagaatccagcaaagtggggttcacctgctggctctttcacttacagctgtgtgaactcagatgaatgactgttcccctttacatccagtctccttatctgtgaagtggagggaaggatgcccacttctcagggtcaccgtgaggatcaaatgagctcatgggtatgaaccatgtggtacatatttatagatgctcagtgtgtactcattcattttaagattcccatttcctgccctctaccttacaaagcgataagcatgagggtatttaaatataggccctgcagctgggactaaaggatgctggacatagcagaggaacaggatgaggacctatgggaagaattttaaaattaccctttccctggggcatgtgtctcacttccagcaacggcataccacctggtcctgaaagcttacatgtgcttgaccaaaagagtggaaaaatgacttttacgtgttttgcttttggagaattctacttgtaactcaaaatctcagcaggcaaggagctaagaccaggttcctgaacctgaagcacagttcactaattcgctggttatactagcacttttaagtcagcaggagacaaaaaaaaagacaaagggtttgcacactccaaatgttactatttaaatagccagtttgccctctctggggacatattctccattcataagggctgggaacagactgtgtcacccccttttttttaatcagcaatgcttccctcactgctagccacctggcctttctttaaccccaagctgactcccgtctcaaacccatgcaatttccagtttgccagacaacagtcctcacttctcaggacctaccattaagcagcaaagcaagttggagtttgaagattccagtttgggtcactaattttactaagctctaagagtcattatctctccctgagcctcatttttccttcaatggaggaaagcagcccttacctcctgcatgaggaccatatgtgagagtggagaataagagagatggcagcataagaatatagcacgagttcaaagaaaacataataaacatatatagggcatcagatatgttacaggcactgtgctaagcacttaatatacattatcttattccaacctcacaaaaaaaaacaacgattatcttcatgttagagattaggtaagtgaggttcaaggaggtggaatcctctctcacattgctaggaagtagtgaggccacaattaaagccctaatctgattcaatctagagccagaattcttaaataatattattcttcctagtgcccttaagtgactggtaagaggctcaatttactaattcctcagtcattcttgcaatgataatgatgattggtggtgttatccatggtggggaagagtttctatcatttctatcacacctgcaagaggagggtgcattgtgagcagccctttctggtttcatctgtgaccacctgctctctttgcagtccatctctacaagtgtgcagcccagcgggagagctgcggcctctgcctcaaggccgaccggaagtttgagtgtggctggtgcagcggcgagcgcaggtgcaccctccaccagcactgtaccagcccttccagcccctggctcgactggtccagccacaatgtcaagtgctccaaccctcaaatcaccgaggtaagtcctgcaagtctctagagcaggaaggggtggccaagagctgaccccaagacagtgggagaggagtgcaaattgagactctgtggacaaattattggcgtacagtgagtttaatgtgggggggtgtaggaaacctctcgcgtgtgtcttaacggcccctgtctaggtataagaggtaagtgtatggaagcgcatcctcatgcctgcgcatgaatgtacaagcgcattggtgtgcacgtgcacacgacaagggaggcagagccaacccagtctccctgccaggctggctgagccaagtgaggaggagaaattggctccatggtgggtgaacatttcagaaaacaggtttagcttttctcagcagaaatgtgatttcaggagccgcaattagctcggagttgcaaagctgaaaatggaagaagagagtaaaggcaggcactacattagccaccgtgccatttcccaggatttactccccgtcccaattttttcatgcattttaatggaaagaaaaggaagttaattatcctggggaaaaaatgatgtttccaaaatagcaaattccaaaggaagatgatgtggatgaaaatgcaattgcttgggtttcaaatggcctgggagaggagttgctgtatttaactttggttgtgttctgtgctccctcttcactgctccctagtctataactgtcactcatgctttgaaactaactgcactttcctggtggtggctaggaataaaggcccaggcaggtacccagtgatctgcatgtttaagaaaggaggaagaggctgctccttttctgcctcttccctgagctgctgcaccatccttttccctgcttcattttccctgctggccaaggaaagcaactctggtcctcacctatgtcacagaatattgggaaacttctagaacgtctctatgattatatcaaaaccccagatcagttttaaaaagaaaccctcaagatagaatgggtgctgctaacctacagataggttatttgaagaggtagaaattatttatttaatgtgagtaaattacatttaatcctcacaaccaccatgggaaataagtattctcacccccactgtacagatgaagaaaatgaggctcagagaaattgagtgacatgcccaagtttataccgctgataagtggcagagccaacatttgaactcatatttaattataaaaccatttttaaattctttacaatattcccaagtaacataaaagaagaagtggtgcttccccttccttcatatccggacctttcatagaccagatagatgcaatccatccacaagacaccatatcccggacaatgcagggctgtcggtgggagagctcttactgcatccaggccctcattcatctgtgcagagaggagttaggagagcacagacactgcctttcaaagacagagctacttcaatcccattttattcttgatcgtgaccagggatggtgcctcctgactttctcctgtgtctttatgtctctggaagagaatgtttgcaggggctgttggtggtgccccagcctctgccctcagacagctagcttcctgagctgctcagggctccgtgccttccccctgattcgagtgatttccggccactgctggcctgagaacttgcactgttctgtaattcttgctgctgcagttgtcagtctctacatctgtgggcacccatggtgtgggggagcttaaattaggcagagacttgcttctatcagcaccacccgcctctgccagccccagcagctgcaccatccactccccaactggctggggcccctttccagccgaaggcaagcttctcactgggaaacctctgcctcagccgcccctgctcgctgaccgggggctgacgggctgctctgttcacagaggacacccaggctacgcgaggctaattaaccccccgaggtaattatgctgtaattgattttcccagtgaacatatcagcaggcatcagaggccccaatctcctgctggtacttttcaagtcaaggctgttgtgaaatgaaggagcatctttggagagagacaaatccatgctgtgtcccaagccactcgggggaggtcactctgaacaggacatgggggagggagcatccaggcctggaatgttgtattcatgattatctggaatattttctttcatttcattattttcatttcaatattttttttcttttcattttctcctacccctaccccatcctcctttccctgtgaaagtcattgtctctttctttaacttttcattcttgaaataattttagacttataaaaaggtacaaaaatagtacaaagaactttcatatacccttcacccagatttccaaagttaacatcttacataaccacagtataattatcaaaatcaggaaattagcatggatacaataataccatctaataaacgtgccttattaatattctgccaattgtcccaccgatgtcctttttctggtctaggatccaatccaggatcccatgtggcattctattgtcatgtctccttagtcttttaatcctcagtctttttttgtcttttatgactttggtactgttgagaagtacaggctagttattttgtagaatgtccctcaatttggatttgtctaatgcttcctcatgatcaaattcaggttacatattactgtggcaaaagtaccaaaaatacctgtatggtacctatcaacagggcacctgacacaacttgaaggggatctcagaagccgaatctgggcaatttgagcaagaacataaaaattgatagccgtggatttcaccaatagaataagaatccatggttcttcctgaaaaaaagaaacaaacaagtaaataaataatggggggacagctgcagtggctcacacctgtaatcccagttctttggggagcagaagctgagaggattgcttgaagccaggagttcaagaacagcctgggcaacatagcagaatcctgatctctaaaaaataataataataattctaaattttgctgggtgtagtggtgcatgcctgtggtgctagctactcgggagactggggtgggaggatcacttgattccagaagtccgaggctacagtgaactatgatcatgccattgcactccagcctgggcaacagagcaaaaccctgtctcttttttaactttttttttttttttttttgagacagggtctcactctgtcgcccaggctggactgcagtggcgcaatcttggctcactgcaacctccacctcctgggttcaaataattctcactcctcagcctcctgagtagctgggacaacaggcatgcaccaccacgcctggctaatttttgtatttttagtaaaggtggagtttgccatgttggccaggctggtctcaaactcctgacctcaagtgatccgcccaccttggcctcccaaagtgctgggattacaggcttgagtcaccatgcctggccaagaccctatctctaaataaataaatagagagaaaagctcttctttacactagattccaactaaaaaatgtagaagtaattacggaaatagaaatcaccatttggcacagtacacaagtaataattgtttcaggcaaagaatggtcaatgaacactaaaattagtagatgaaagtatgatgagaaataggatatttacataaccttaagctaccttcccataagatacttgttaattatgacaagaacaatagtgactgggcagtgaagaaacgtggtagacctcacctaaaccaattgatgaaagtaaacaaagccagtaatgggaaaaatcaacctcatgtacctttcaatagaatgctctgagaaggacacaacctcatttctatggtgtttttggcaagaatatgtaatttgctaaaagcaacctttaaggagattttcttttcttattattttttttttttgagacagagtctcactctatcgcccaggctgaagtgcagtggtgtgatcttggctcactacaacccccgcctccgggttcaagggattctcctgcctcagccttccgagtagctggtactacaggcacgtgccaccacgcccagctaatttttgtatttttgctggagacagggtttcactatgttggccaggcttgtctcaaactcctgacctcaggtgatccgcccacctcaacttcccaaagtgctggatttataggcatgagccaccatgcccggccaactcattttctttacttcagctttcttggctaatccctttgcactggcatagatgttttccccaaacctctgaatcatcggacttccatgaggcccataccctttgatgcagacctccttgtccccagccttcatcttcagaatgggtgtcctccttagtgcagccactctgtgcagtaaatagaagccatttactacaaagatccttcttgaaggatgaaaagagaaggattctaagatggcctgtgatggcagttgggggtggcagaatctccagtcctggaaataagtggaagctggaatggatgctgtccttcctgggacagcagagaaataaatgagatgatctcaaaggagttctacgttagaaaaagaagtgggctcacgcatagttagataaacagctgtgttattccttaacccctccttaccccatcttctccatggcaaccaggcccacccgagggacccatcttttatggcagcttcatgtagaacaagttgtacaggctattgaatttcacagtttgcataaacttcaggttaggaccccctcaggacttaccttctgctcctcagccagctcgtggtgtgataatgatgctgtcccccatgggaggcctcctgagctgctcccatttccagctgtcatcgtgggtgtctgtgcacgtgtcacctgttcaaccctaggaacaggagacgtgcagaggattggaaagcccatgagatggctggcccgccacgtttccgttcccccagcctatgcttcaggacctgctgggacctcaaagaggagggtgttaggagccacagactggaaaggaaggcccagagaaaaacatttcttaaggggccatgagtaggcaggatccagcagaaaaggaagagactgaatattttctcaggaagataaactcagggagggtaaagggattttggagctcacataacagaggtcttcttcactccaagcgagtgtatcagtttcctagggctgccctagcaaagaaccacaaacaggtggcttaaacaacctgaatgtatttggaggtctgaacttcaagatcaaggtgtcagcagcgtgggttccttctgagcgctgtgagggggaatctgttccaggtctctttcctggcttctggtggttgctgggaatctttgccgttccttggcttgtagaagcatcaacctgacctctgccttcatgtccacatggcattctatctctgtgtgtgtgtctgtctccctattttttttttttaaataaagaccctgtcatattggattagtgcccactctaattatctcattttaatacgattacctctttaaagaccctatatccaaagaaggtgccattctaaggcactgaattaggtcttcaccatatgaattttgaggagacaagagtcaaaccataagagtgagcattctgatcagaggggggagatgccaccattccaaatatgttaattcactcattaaatgaatatttaattaatgactactgtatgccatgaactatgctgggcttggaagttgtctgtcacatgtatatgtgactcctggttaaggaggctaggttatgcagcctcttccaatgtagccccagcctatgcttgaacattggccacctggaagaggctggaaactgactgccctgcaggccattgtgcttcctccaaaaggcctagggcagacttctaatctccaccctctgcagttgtgtcctgtgtagaaggactgaagcagggatacaggtcttctgttaatgaggacactaacctcaggacctcaggcaagggacatgagcagaccagccaacattctaattctgggagtcttcatgataattgcttctctttaataagactctcccatgtgccaggctctgagcctactccttcaaacaaccctgcaagttggctattattatcttcacttaagagttggggaaacagttcttagagaagtaaagaattagcccagtgtcacacacacatctggttagtggcagagcagaaggccgacttcctccaccacaccatggtgagggggatggagggctattccttggctatacatttccccacctcatcccaccccaagagtacctaaaatgtctctgcgtgcaggatcagaatcctcttggaacttaccaagagatgccagataaattgggaacattggctaccctttgtactgagccttaaagtaatcttcacctaactgtcttcctaaatgtaatgaggtccacacttactcctatgagtgggaggaaaaacaagaaggggatattggggcatgtgagcttggggcagtcacttcttgccttttgggggaagcattattctaacctctaccccagttatttcttgaagctatcacactcagttgggttgtttttttggctatgcccaccaatgagatggccattaagctaaagtgaaagctggattccctggcctggcagctctgacctctcaagcatctcagcctaatgggagaggccagacaatggggcccaggtagttcacacttgcaggcaagaacagagatcagggtgaagccaaggcaaatcaggcttaagatgcaggagatgaacaccagagttggtgtgaccaggaacccaccacccttaagatgtgaaagaacatgactgtgtgttcctgaagtcacctggcacattgcaccataaggccacattgatgccaggcagtgggggtgttagtttaacagctgtttctccaatgaccaccatgtagcttttactttgtgaatttttcagcctcagtaacttctccaacacctccctagtccatgcttagggaatataaattctctttaacattatcttacgcatcttaggtacgtgtaactgagaaagaaaatcaattatagaaaaccatgtacactggcctccaaaaccaagctcaaataatttttgataccttaatagtttgagatgatccatcactcctgctggctcctgttctccactttcacaaataatttaaagtagattggtttcgcctagattctctcagatgcaaatgcatttgtgaaactgtttgggaaactgtgggacatttaaaagtatttatctgcaaggctgcaccaaatctctgcaggaaaggccaaaagccacctgcccaggaccagagtgactcactgcaaagtcccccacaaataaataaataagtcagccagctttcctgagaaacaagccggcactctgatctttcgttcatttatttgcaggcctcattaatataacatcactgcaacaaacagctaacgggggatggtgtcaggatgaataatggagttactctgctgagataacagttaggttttgaatgtactatcagctaagacagagccagcaaggattcacgccgggcaggagagctggcaccgccaatgccatagattcctacagagctcgtcagctgggctctagcctactgtgaggagtgcagacacaggcacacacacacagacacacacacatacactccaagtggaaaagaatgccacaatttgctttctcagacccagcatccaggtgtctttagaagccaggagggaatgaaaatgtgcagccacgaagttggcatcactgccctgtaaagtcaaaggagtgagaggattaggaaagagaggagaagctgtcaacacatcctcgacttgtcctcactcgttggtcctgattagggggctcctcagggcagaaccctcctgaaatcccaatctcagacacaaaagcttttaatacagagtatgaacatccgctgaggatgctgatgggactgagaccattctggagtggcttcttcggcacctcttctccttctgggaggctctgacattagtttctcctgtatccttttacaaatccagtgttggggactgatcacctgctggaaaccatggtgagagctgtgcaggcccatagaggggcagccaatgccacgctgggcaatgtccccaccaaccacctcccctcctcgagtcagcctgcctgcccctgccctgagtccccaccaagaacaatatgcagaggctccacctgcacaggacgctcgtgaaaacaaagctacttttcctttggacctcagctaacccagcttccctctggatttcttcatcataaaacagtcatgagaaaaatcatagctaactttcactgaatgcttagcttacacttagctcagcacccatatatcatctcatttcgacctcaaagcaactgttatgaaatagaagttagtattgtcattagacccattttacagatgagaacactgaagcactatgaggtctgataactttcttgaagtgacattgagaataagttttagcactgaaatttgacctgcagctagctacttgactcaagagcccctgtgtttgaccagtgtcaaaccagtccttcatctctttcctgagctcacttggacaaattagaactgtcaatctgcagagccagaggagagaaaggagctggcacctagctcttcctcaagcctgctgcagaaatgggaagaaagccagtagtccccaatcccagcattgtttggggagactagacatgcacaggaagagacaaaggggcaaggccaagaggggagtgtggatattgcctgggtgaggtcagagaggagtggggatggatgctgagaagttcagggagccagagagagcaggagtaaaggcagtgaccagcaaggccaactccagagctccttggaaagcagcaaggcatggccttagccatgtcttaagtcctggctatgcacttcttgatctgtacatcttaagcctgctgcagagatgggaagaaagggaaaggggctggagtgcctaagcagacagaagcgaagagcaggccagggcatgcattctcatggtggttgaccaaggatgggggtgtcccctggggcagtgctgtgtaaggcaaaaagcagcggttagataaacctggctgagctctgccccactcactgtggaaccttcaagaagttacttaacctctctgggacactatttctcatccgaaaaatgggaatgataataacacctcacagcttgttttgagcgcttagtgggataaaatatgtaaagcccctggcacaattccttactcattataagcacttaacaaacgtgaaagcagcagccatcattctcagaatcttcaataccttggagctgaagccctgcttctggcttctttcccgctatctctatcagcctggagatataaccagaggaagatagggtctctagaacgggagctgggctttgtgaagctcccaccaagctcctctgccccgataagcccctactctgaagttggccccaaccctgccctgacaaggctctgcctgaggctgaacctaggaacagcccacctgagcactcactccccaggctgccaagcccctgggccttccagcgcctccccagtgcagcccttcgcatctccccagctgtaattaattggctgcatctgctctcacccttgggctgctttgtggcacagttccctccaaactgttcaattagtggctgcaagaatgaggtcgggtgcagcatcaccgcggctgctttccaggtcatggcacccacggaggaaaacaaacatgacagggtctggcaggaatacagatttagctgtggtgccctggcgctctcctgggttcagttgggctgtgcagctgtcaaggtggggtctgagcaggtggagaagtgactccctaaaccagaagttcctggaagctttgagagggcctcagcagaagataggaatctgctacttagtcccctgccatcgtcatatgtgctatgacctaggcatgcctgcctaatcccacatcctgctgacctagtcttcctggcttaagatgtacagatcaagaagtgcatggccaggacttaaactagccacctttatacctgggcgtggtcactgactgctcctggggcagggtttagggctgctagcctgagctctctaccctaaagtgtttcccttattttccttctgaatcctgcaaacgatatacacactttttattctacaaccagtcaatagatatcagtgctcttaaggccaagtaataacacaacttaaaagtcccattaagacgcaaatacagctttccgtacttgctgtatacaaatacagaaagggaggagggaacagctgaatgaaaggtgcctaaagtgggggaaagaaccccagggaggaaaacacaaaagaacatgggaaagataccaaatgtttatcctccactgggttttgcccagggccagcctggttaatggcgtgtgtgacaagcaaaggaagtcatcttcgcaggccctccttactgcacatcaatcaatcaggcctttgctgaaggcacgacccgagtgcgggtcactacactctcaaaagatgcatagaaatccgagagtccacagaaaagcatccaaaatgatcaaagggtttagaaaccaagatcttcggtgaaaaggctggaaggactgcagaagcaaaggccaggggtgacttaattgctgtcttcagtagctaaaagatgtttgatgaggaggcagctgttcagtcctccattcgatgaggaatcaaaccagaaattggcttaaattaaagcaagggagattgcaggaagagctgtttaatgatcctgatgttaaaatactacatcactctcaagcaacagttaggtacctccactcatccagtcatcattaaagaatacagtctgttctagtgtctggttgagaccagcatttccttttaacagagaattggggatatttattgacagttactcgttccaggcagcgtgctaaggattagtttcctaagaaaagctagatagtcccttgtcccaagatagttatcgtcttattgagggaataagcagttacaatgcagtgtggcaattgtggtcctggaggtgttcatagaaggaagtgggagggtagaagaaggggctagtaaatctactaagggagtccagggaggcctccctgaggaggcatcttttgagtagagacttgaggatgggtaggcatttgtcagtggacatgcttgaccagcacagggaacagcatgtcaaatgcatagaggctttacaccctataaagctatagctgtgggggcccttgagctctcccagcgagcacatgtacagtcatgcatcgcttaaccatggggatacattctgacaaatgtgtcattagacgatttcatccttgtgtgaacatcatggcatgtatttacacaaacctagacagtgtaccctactacacacctaggctgcaaacctgtactgcatgtgactggtcctgaacaccatgggcgattgtaacacaatggtaagtacttgtgtatctaaacataaaaatgggatggtaaaaatatgatataaaagattaaaaatggtacgccatatagggtatttaccatgaatggagcttgcaggactggaagttgctctgggtgagttcagtgagtggtgagtgaatgtgaaggcctaggacgttactgtacactaccatagactataaacacagtatgcacttaggctacactaaattcattaaaaaattgtttccttctttaattataaattaaccttagttattataacttttttttttttttttgagacggagttccactcttgttgcccaagctggagtgcaatggtgcgatctcggctcactgcaacctctgtctcccgggttcaagtgattctcctgcctcagcctcccgagtagctgggattacaggcatgcaacaccaagcctggctaattttgtatttttaatagagacagcgtttccccatgttgctcaggctggtctcaaactcccgaactcaggtgatccgcctgcctcggcctcccaaagtgctgggattacaggcatgagccactgcgcccggccagttactataactttttactttatagacttaattttttaaccttttgactctttgtaataacacttaccttaaaacacatacattgtacagctgtacaaaaatattttctttctttatatccttattctataatattttttctatttttgaaattcacttttttactttttaaatttgttttgttaaagactaagacacaaagacacacatcagcctaggcctacccagggtcaggatcatccatatcactgtcttccacctccttatcttgtcccactgtgaggtcttcaggggcaatagcatgcatagagctgtcgtctcctatgatgacaatgccttcttctggaatccctcctgaaggtcctccctgaggctgttttccagttagcttttttttaaataagtagaaggagtacactctaaaataacaataaaaaatatagtgagtacataaaccaataacctagtcatttagcatcattatcaagtattatgtgctgtacataattgtatatgctaggctttcctatgacttatgactgccacaatgccacaaggtggtaggaatttttcagctccattatgatcttaaagaaccatcgtcgtatatatggtccgtcattgaccaaaacgtcaatatgcagcacaagactgtagtccataagaggacagggccaggactctgggggtcccaagtgtgaggggcgggcagaggaggggcacacaggcagtgccagcacagcacagaggggaaagcctcagtgacccctttcgccccaacccaacagcagcaggctgcttctaggatattctttctccaatcccctccttctagctctcacttctgaggtccacatggggagaattcagatagacttctagtccacagtataatatggggagaaaagcttggggctgaaatgagtcagtatccaaagatcttccctgctgatttgacaggtttcacttcccttccctctctctccacatccccaccacacacacactcactcacacacacacacacatacaccccccaaactgtcaaatcatttgtttgtgtgggtgtctcattcagaagtacttccctgaaagcattaattgagttcattgtggaatgctgcacctaccccagaatggctgatagccagggaaagaagaaatggccacaagggagggaggaaagaataaagaacatcttgtacagggccagtgttcttccaaacttattctgggtgaaaggatgatgtctcgctctgaatctgcttctgtgcagggcccagaactcaccaaagccagggccctgctctggcggcatcactactccctgcccaagctcaggcttcgggcattctccaaacggcccatgagcagctctttgtaccccgggtcaccccagtgtctgtgatgcgctccctcatccatgtgctgcccttccagacggataggaagacttccatcatctctaaccctgccaattctaacatcccatgttttagttatctaggaagacagaggtgcagggaaacacagggaaggagattaccaattatcaagacctactctctaaaccagcatactaagaactctccagatgttatctcacttaatcttcacatcatccctgtgaggcaagcattattatctgtttttgaatgaggatattgagattcaaggtcacataacttgtaggtgtcagagctggtatttaaattcaggtctgtctgattccagaggttactctcttccttctgcagacactgtcccagcatcagatggtctttcttccctatccgactgtagccagcagcatagagctatctgaaactgaccaagacatggatctgcctaacatgctggccatactttggtttcccttctgtcattggggcactctgtatgactccaccgcagcctctcatcctcacctctgtgggagacaagctctcccctcccctgcagcctctcagctccttccagatctagaaggacttgcttaaagtcctgcaagcagtagctggggattcagccaaattgcccctctatagatccatgtagaaaggccagacttggcttccaggagagccaactttgtggaatgcaaccctgggtgccctgcaatcaaaagctgcttttaagagagagccctggggacacagtctctgtgtgtgttgggcggggctggtgggggtcgggggattgggaccctgcagcttcctggtctaaggtggtgtcctgcaagatcctgctcactccccctctggagaagaaattctttgtcaccaagcctcccctccctggccatctccgaatccttgatcctaagaagaaatacagaaggcaggatgcagggtccttgcttcccgggcccaacacagagatggcatggcccttagactcattctcagctgcctggaaggcttacagaagctgccttctacagggtgcctctctctgttcctttgcactctgcacacagacctccaccttgagccactctgatttttaagctggaggtgaatgggtaacatgtccaaaggctcagggatttttaaacagcgtgatgtagaaaggaaccaccgatagggcagggcatgaaggatgtgctattgaatggaaagtgtggcagaaggggtaaaagggatcagaaccagaaagaccacacctgccaggccagccttaggaattagggactttgccttggcaatggtcagagccatggaaggtttttagagcaagtgactagtaacctggtcaagtatgtgttcatgaaggtcaccctggcagctactggaaagtagatttacatgcaaacccttggggttagtgtgggtaggagatgatggagtcctcctgaacacctactctggaacacatggactcaaaagacacctgggagtgagaactgatagggcctggcgaccttctttattatttgtggtagatgggagaaagaaacagttgaaggtgcttacagaattcctggctgggtgcatggtgagtccattaaccttgaaagaggatctgggagggtaattggcttgggggtgggaggaggaaaaattaagagttcgtttttagacgtggtgaaatgtgaggcgcctgagggagatacatggggaagtggagatgcccagtagcaattggatatatggctgtggagctcaggagaggggcctgcgccaaccttatggatttggaagtcatcagtaatggaggcgttgggaatccacttgcaaatcaaataatcaccacttcatctatgttttggaaattcaggcttttacacgtcagttttgctttaagcaaggaagctataagctgtgtctcctgtaagccccagagcatgatagttgcttagttgtctcctgaactcccttgccacctaccctgggtgctggcagcatggtacactgcatagaaagaagacccccataaagaccctacactccccagacactttccaagccctgtggacctggtttaatgacccacaaggacactcattctcccggcttggattcccccagctgctagctggaactacccatctcacttgtatcttcatgccaagattataatgcttgccaataatttacccaaaaaaagtcttcttctctaaacaatataagctgaattatgcctctgagcagctctgtgctaacaaatagaccctacagcaccccagtgcccacgaccatgtgtctgccactgatccttgaatgttggaagggaaacactacagtgatttaccagcaggaggaagctaccccgtggaacctgccagtgcctctgaggatccacaatgcggtccccacatgctacctgcaagacagaaatatttttaggctttccagaaagatttcatttcacagtttttctgaaaggttgtaattaactgcagcgagcaaaagaatgttttttaagaaataaaagtaggggaaggagaggttttgtcagttcctttgggtaggtgggttcatgccatccaggtggctaggggaggggatggaggggctggtgaagctcattccaagtggattaaaagagaaccaggaactaaaagcaaattgtctcctgctgatgctctcctgcagcaggtaaggaagcagccctttccatttctcattaacaagggttcttttcccagagcccaggagtcccaggtccctgaggaaactgtgccaggggagactggaacagccagggtggattattgttgcatatttttagagtgcagggacagatgagctatagtggctgtcagttcctcctgccagctccttcctctccaagttgtccttccttctcccaccctcacccccagcatacagagacacctctgagcccccttgactatatctcccttgattcatttcatgtgtgctgtttatttttattcataagggggatattttattttcagacaagggagtcagagccatagacaaggtgacttggataaaataagcctccagataagagcattcagggcctggatgggacagagggaaggaggcagcaccatctttggcctacggaggatagacaggcaggaggtctgggttcaagtcccggctctgcagccaacttgccgagagaccgggagtctgaacagcatatcagctgggcagtgagggaaggaggcatcttttctctgctcactatcacttggtggttggtggctgaattggcagcacaattcatggtgcccacatcacaggaagggagcagtgcacctgccgagaagccaggagataagaagggtctccagatcactctacagcatgctcacctgtactcatccatcatctccacctgagggtacgctgaccctcccaccccatcggacactccaccagcacatacagggtcaagagggagactgtccagaagtgtccaaaaacagagaggctgtggctctgcccaggtatcctcttctgggagattctagaggacgctcgatcttcatcaagtcccctttttttttgctccttccttcatccatcctgccctccctatggtgtagtaaaaagaacactggacctttttacaactgtgtatacaagttgttcaaagctttggatatatccctgacttctctgggtctcattcgtcttgctgtaaaaagtaagtatcttagaataagatactctcagatcccttccagttacgaaattctgtgttcctctgctatctaggattgagttcacttcgagttatttttcctacttcagataactattggccacaaagtgtgaacttactcactgggatctgttggatcccaaagagctacatttttccaagagcctggtctgttcccagatagaactttattacatcttgagagacccggattctgctattctgtttccagtgtttggggtctgaattaaggaatgaataaataagcaatccttgccaacaggaagccagcaaagatttggaaaatcctaaagttatttcttctttgtcctagcatgtgtcataggatgttttttgcagaacagtgtcaagtgcactttccatctttgatcttctcccctgcagccacacctagtctctactccccacactcccactgctttccctctgtatctcttatccgtgtataccccaaatcagtggtattcatgaactgcctttatctcatcctcgactctaagtttcttgaggccaaatttcctgtcatattcatcattgtacccccaacaggctgtagcacacagcaggggcaataataacactgtcacaattacaaagccctctggtttccaaagtgctctcaagcacaccttctgtttggtgcttccagactccctttgaggttggcagaaatgattatacccccttcacaactaagaaagctgaagttcagagagattacgtgactgatcgcaatcaggcaactagtgaattagagacatgtctcaaaccatggttttctgccttgagtctagtattctttctgataattttttaaataagtagatgaatgaatgactgacttaaagaaccgaggaagcagtgtaaaacagaacatgatgtcaagatccgagataagctaaaaagtggacaaaacgcactcactcaccagaattcctggtggaggaatttaagaacctatggaggttcttaaacctccctgggggagggggaagggtgctgctgtttctgttcctgtgaccaaaccaaattgctaatcccatttccctcctgcagattttgacggtgtctggaccgccggaaggagggacgcgagtgaccatccatggcgtgaacctgggtctggacttctccgagatcgcccaccatgtgcaggtggctggggtgccctgcacgcccctcccaggggaatacatcatcgctgagcagtgagtccgccctggccagcccttttcccatgggagcttcagagtggagactggagactctcccctctcccttcctgggccttttccatgattgatctcccattacattctcctcccatggacctgccccagaagcctccccagggccccctcctccctcacctccaccctcagggggtctcatcctgtttgattccctgttccctgactcttctggcatcagggctccggccctgaccgtccctcattcagtctttgcctgcccgccagtgtgactgagcatttcctcctaggtctcccccagcccttcccctgtcagcccccattggaatgcatcctgtatggtgggctgcaggcaacaatttgtttggtgcgtggggctctgacagcagcttaatccgagcagggcctccgctggagcaaattcatttatttcactaagggaaatgtcagctggaaattagaaaataggcatgtagttgcggacaggcaaacggggctccaggagtgacatatgttccaatttggggtgttcatttggcagtggtggctgctgtggagttggtgggcaggaggtgggcacgaagctgggggtcagaggatggaaaaagggaggctacccctccaaaggagaaagcgggggagcagccaaatcattctgcatgatttatcagggaagttgggtcaaaccattctgattccactgtgaacacagctctgcagggggtactgggagcatgagcaagagcatgactttggggcagggacttccttcccttatcctaaccctctgccaggtcaggttgtttcctctgatcccccccaccggagccagcctttagtggcaaccataaaaatgacatcgctttatcttccatcagcactttgcagttaacagagcactttctcatccactatctcatttttaattggtaaggactctgagaggtaaatattgttatcatcattctgcaaagcaggagagagcaaaggactcatgagaagtgaaatgactttccccagttcattcagggcataagtggctgaggcagaattagaccttgagtctcctgacccctaatgcagggctacttcccttccataacagtgatggggcacgactcctggacaggagcagtctgaaattccacgaatcagtgtgtagctctgaggcttacaggccgtgattctcgcagggcccagagaagggtcagagtccaaaggggtgaattcccagactctgagggctgtgtgatgcctgccagccacagcagggagaagaaagagctggcctgatctctcagatccttcaggtctgatccttcaatgacagccttattcctgcaaggaatgagtcctggaggaaaggctggctgggcctataggacagagatgaggaagatggaaaaagggaaaggaaacaaatagtgcttctgagccaaaaaagaggtgaaagctgttgtggcaggagccagggcacccacagaggtcctcctggcagaccatctttacagagccccgcaccctgccagactaggcaaggtgctcagttacacgaccccaaatccacctcaacctcaaggacctcccttgggcccctggacacagacctgtatccaacttggtgagatgccacaggaatccaaaggaaagggctagggtatggggtgagggtgggaggtaaggcttttagctgagaagtgcaaattcctgggcaactggccctcagaatcacatgaggtttggaatgaaaccgtgttttagacctgcctcctctactgaccagccccaagaccttagcaagctgttcaatctctgtgaccttcattagcctaatgtgctgcccaaatgtaaggaatttcagtgctatttatgaaaggaaatgtactgcactcaccccacacccagggccacggggaagaaagtgtcgagagaagctgcacgtgaggctgtgaaaggagcctggggaggggaacaatccccatgcattcctgcagaggctggtggtcgccccagaaaaccaccacttcaggtatggggtaggcagaagacagagagcacaccccatgcctcgctggatgcagccctggtttccagctgtgccaggctcattaccactcccgaggtttcagagtttgctaacatcattaaagcctccatcccgggcagtgagcagcaggcacaatcgttacagatgtctgtgagagatgaatttggctaaaaggacccggtgcagagtcctgggcgcgggcaggattcgccagcacggtaatgattcaccatatgcttgtgctgcgccatctatcactcagcaattaggttaatgtcggttaaagggccccgcttagtcctgcaatcagcaccccacaggtctgtggagggctggatgattcagtcacaggaagtttcctggaccatgggatgcatgttgaggctgcagctcagcccctcctgggacaggggctccacatggagcagattccccttagatcctcaggctgcttccctctcatctgctgtacctgtgaactcagccattgcgggatggatgtgagatgtgtgtgtgctgccgccccagggagcgaggcaccatctatgcaagtctatgggaggtggtgtagtgtggggcaagggtactgggttgcattccaggagactggtgctcaagccttagctcagctgtggatgaaccaggtgactttgagcaagtcactttgctccctgcttctcaaacatctcatctggaaaacaggtatttaggaatagatgatttctacatttgctttggtggtcctctagatgtccaaaccagtaaatggtatgccccatggaatctgcagctcccattgtaaagattatctgtggcactaaggtgcctccggaagccccctgccaccaggaggagtcaggtcttcagatgtcaaagctggatggctgtttggtccaacttcccattttataaggagagaatctaggcatctccagcgattgtctcctaacaatacatagggaccccagagccaccagagacacagggaggagacagggaagacaagaggcctcaagaaatcaaaccacaagaaatcaaccaaccttgctgacttgcaaggcttgaaggaggtggtggtgcacacaccactgcctatggttgtctacaaccaagaaggtagaggggacaagtggttagctctcagaacctgaggaacccagctcagcctttctcaccacccctgccaacaacctcacctctaccattgctgccatatccatactgtcccttccttgaaagacatacagagcatcccattaaatctattggcagtagaggggagtggtcagaagcatgagctctggagtcgagctgacctggatttgaatcagggctctgccacttaccagaattgtggccatagataagtcacttagcatccctgagccttagtttcattgtctgtacaatggagataagacccgctctgtagcagagcctgaggatggcatgagatcctgtcttgtagagtgcctggcagaatcagtaaactgtagttcttattattattaagggctagaatttgctttggcataatactccttcctcaatataaccctttccactccctgcagctgccctagcttcttcctttaactccctatcttcctgaactcaaagaacaagtgcctgcaacaaatattttcaagccctttccacccttgcctgcaggcactgggtcccaggaatgaaagggaagaagagttgaggagattagagtttgtctgcaatgctgcctgattttcttaggactctccagttcttagatcttcctgcccagacccttttctacaacccactgctgaccacagccctctgcccactcattccacagctgagaagggggctcggctgatgcccgaggaaagagacctatggccagctctgatttctccccagtgcagcccctggacccctgcatcctgcctttccaactacaggtgcccttccttgcacacttgagtggcatccatctctcagtcatcactcttctcctaggtgcttgaatatactgcttttcttttgaaacatgagccccaagcaggaaaatgtcctagaagagacagtgtgccaagaggccctggcccatcattagctccacacaggggcagctgaccagggctgttccaggccttctcctttcctacacagacccagggcccagggaagaacatttccatgctgcccgtgaccttcacatgttctcttttttcttttttccttaacttcaagcctgtgatgatttcttcctccttttcttctctaagatcactccagcagagtgtccgagggtgatgactgagtaacaagcacaccctcattagaagagagggagagaaacttacctactccctcctgttctcttcctttgtcttccccagcactgcccacaatagctagttgattctcccctggagctccttgagcatggtgggcatcgtttgcaggatgtcagggacctgaaacagcagcgggttgccagggtccgggaaacaggatgagagagtcgttaaccacacgcaggtagcagcatgaagataaccacacagtaccttaaattgagcttctcgaatgctcccctaatggggtttcaggagacagttatgtgtaaaatattaattgatcatcactatcatgtttccttgggtttataattaattgattgattcatagagaaagggaagagagactattcttccatatgcgttcagtactttcttgttgaatctaatatgctaaaacgtaataagacagttattgcatgttaagtaaatattcgctaggagtgaaagtagttatttgggattaactgttatgaaggagatggagatcagtggcgtgccatgtgtgtgagcatgcagcgtatttgtttaatgcaagttttattacatcgaaatgaaatctctgtttagttaccttccttcctagagaagctgttgagataagcatcgctcggttaaacacggatcttccccaccgtgccaggataatgctggggattagtggagatggggtctgtttttctgactccccactaagcaaacctaccaggagcaccagactgctctgaatctccgaaatgatgttgggaggaaaggaaaaatccttccctccattcccaagctctttttagctgagctgtcagggccctctcccacccagcccaggcccgaccattccaggcaagagtttccccaagtccctgatgccttcatctctccccatcctcagctgcccaccctttctagaagggtaccgtggctaaggcaaccagtatctaaatgtgcttgtgtaactgttctcaggcgccagggaagtcatcactaggggtattgatctgggctgctcgagagagagcgctgcacacttcttccctccagctctcccgttagtgtgagacgtgactttcgctcagggccgtgtcactgtctctcccaccgggtgtgctcagcccttgatgaagtgagaggccagtgtcacctgctggcctaatgaacttgtccagctcccacccctttgcctactgcggcaggactccacccctcccgttctgcagggagctccttctctgagctctcactatctcaccagattatctctcccctttttaaaactcactacaggaagcaaaccacaattgaatcggcttggcaaacatgccctcacccactcctttagggagtgtagcaatgtctgcttgttacataggagagagcgtcagctagattgctgccccgagatctctgttagacattccctttattctataaattctgggtccctacccaatgccaggcactgcgctaggcatggggaaccacagaaatggccacagaattaggcagcagagcatatcagaggcacacagggctttagagatgatccggttcaaccttcacactgtgcagatgagaccaaagcccagagagggaaagcactgtacccaaggtcacacagcaagatggatgaccaagctgagtcttggtctggcattattgcaagactgtgatgagtcatttgccatgactgggagagcaagtgaacagcgatgccagcccttgcccagtccctcaccagaaggtttgctttctccccaggattgtctgtgagatgggccatgccctcgtgggaaccacctccgggccagtacgcctgtgtattggcgagtgtaagccagagttcatgacgaagtcccatcagcagtacaccttcgtggtgagtactgggtccagggccaggtgcaggtgcccagggaggagacacacatgctccagactcctcccaggaagcccccactcccctccaccaccaggcttcttgcagaccaaggaggagaaaaggaccctccagataaggcaacttctggtcttgctgttttgagagcctgtctttccgggatgagatgggcatgtgataaacaaagctgtggagtcttgggagtcccagagggccacaggtcagagttctaaataaggcaaaatccagcctttcttagaaagtggatcctagactgggggcggggaggaactgcctcttgtcccaccagtgtaatatcttagtctaattctagcctaatgaggatgcatagcctgagggacctaattaaataagtctatatttatccccatgctttgttttctgccaaggatattttaagtgggagtttagaagagtcactgaaatctggcagggatgtgtatctgcacaggaccaccagagtcactctgtatgtgtaactcgctactgtggttacacgcacacattcacacagtcacacctgaaaacatctctttatgcgcaggcaacaggtagtcaaattgcaaagactttctttctgtaatggcactctattcatactgaatcaataacttgcttctggggccctggagccacccagggctatattcatactgaatcagtaacttggcttcttcggccccgaagtctctcttctgacacctacattgctacatcgaatatttcattaaaaggcattaacactagcagatggggtcaaaccagccttgctgagagttttaaaaaatctttggagcacaaaattctattttctgtaaagcattttgctgattgtttcaggttttctagcctctgccttcttatcttggcatctccacctttttcttatactctcctctctcagactggacagtaccttgccctatctgcagccaacctactccatctcttacccagggcaggggcagtgggcatttgtgtgagaagcaaacacaggagaactagctggggagaatgtcagtactctgacaatctggagcaagtcagagcggagaggggctttagagataacctagcccaccctcctcacttgacagaggagtaaagaatgatctcagaacttgcctcaggacacacagcggatgaatggctgatgcaaactagaattcatgcctgtatagttgctcagttaaatgcattttccaattcactccactccactgccctccaggcagaagcaattcttttctgattcaggtcagccacctgatgcattttaggttaagcaattcttttaagcttcaggctgaattttactacttagtgagcttagtagaaagccccagccagtgatgcgccatcctcctgatgagggtctgagaagccatcctaacatttactgacagctctctgcaccaggtgccctgctgtgcccttcttatgctcagggaaggacagaagggcatgtgcatgggccattaatggaggactttagcctctcggtggcccaacccaggcagggatgctttattcagccctatcgattttgtgcccaaaaaatcagtaaaggctctagatagagaagcattttcaaattgttctcaatttgtaaacgaattgatagattagtcagtgtcacctctgctttcccttcattgttatgagcatgagactctggggagttaattaatttcaccccacatgactcttctgccttcccggacatgcccagagatgattcttagaaagagtctcacctctggggtaagcagagagagcatttaggattgaaaaggacaggacaagtaccaccacgcccagaatgaaaacaatctctcccatccttagatctaaccatggtccatccttttggagaaaacctaagctgtagtcatttctctgcttctttccaaagaacccttctgtgctgtcactcaacccaatccgaggtcccgagtcaggaggcactatggtgaccattaccggccattaccttggggctgggagcagcgtggcagtctacctgggcaaccagacctgcgagttctacgggtgagataaacttgaagggccaccagaagactgcacatctgggacatgtgctgttcacatgttactgtgcatgttcattcataggcctgccccatcacctccatgttatttgctacacctagacccaaataccataccggtcactgtgagaaatatatgccacttgtcagtttatatcccgtatatcaaaggggctggatacttctaaaaataatgagaagtgagggccatgagaacaccagatggaggaggctcctaggagctccccagtcaccactaggatcaagcattcattgagtcctcactatggtgacttgaaaaacacggagattgcatagcctcagttcttagaaagcacagacttatgcttagggaatcctctgtacataaaaaattgaacacctaccatttgccagcactcccctagccctgaagatgtagagaatttggaaagaatccatggatgagaacccagtttgcccaggattatctacctgataatctccttggaccgtaaattccacaagggcaaggactgtgcattcactgctatgtacagtaggtgctcagtgaatatttgttgactgcctgaccagattctaagcactgactaaatagttacattctagaaaaatccagaaaaaaggagtttccccgaagcccatgaaaccctatccctgcccctcattttcaaacccccgtctccaatttgctacctccctaatccactggggcactgatctatactgatgcgggatgtgttccattgttgtagaatataaaaggatgagagaacacttctgtggccttacccgcagaccaaggaaagccccttgtcaagccagtgggcacctcttgttgcccatgcctttcttctcaaccctcctgctgtctccctgtcaggaggtcaatgagtgagatcgtgtgtgtctcacccccatcatccaatggccttggcccggtccctgtttctgtgagtgtcgaccgagcccatgtggatagcaacctgcagtttgagtacatagatgaccctcgggtccagcgcatcgagccagagtggagcattgccaggtgaggtggaaggtgggagggatgcacctggaagccacccagcatgatccctgcagcccaagtctggctcatgagagggatccctaaggtggaggttcaccatgccagatttgagggggttttttacctaaccgagcctctgcctgttttcagtggccacacacccctgaccatcacaggcttcaacctggatgtcattcaggagccaaggatccgagtcaaattcaatggcaaagaatctgtcaatgtgagtaactgttggtctgccccagcctttggtaaacacagctctgtgttgatgttttgcaatgggatgagctctgggttaggcactggagcctctgaatactggagaggaaaactggcttaagactctgagcctggaatcatggtccaaatacctaaaccttataatttttttttttttaagacatggcctcaccctgtcacctaggctggagtgcagtggtgcaaccacagctcactgcagccttgacctcccgggctcaagagatcctcccgcctcaacctcctgagtagctaggaccacaggcgcatgcttggctagtttattattattattattttagagatgaggtctctctcttttgcccaggctggtctcaaactcctgggctcaagtgatcctcccgccttggcctcccaaagtgctgggattataggcatgggccaccatattcagccctacaatgatttttatattataatgacagtacaatttcttgtcagaaggtgatatagtgagtgtatcaaagtactggcttctgagtttatgatacagcacaaaaggactcctgttttatgacaggttgactttgaggtccagtgaaaacccatattggaagtggttggagaaattctggctccagattcagacatgtctggagaggaagcagggttctgccatctattagctgtacaagcatggtcaagtcatttaacctccggatcctccacctctcagctatgaatggtgacaagcagacctgcctcagcttcataacctgccagcccgtggctggcataaggttggcagttgataaatgctagtcactgcatcagataactccacctaggttgctaagatgataagtttggacattttatattagtcttccatgcatagccatgtaatttttataatttttaaaaagttgtctgtatcgtagggatagaatgtctgatatgttgtcaattttttatcatttttctaggctccatctcactctttcagccaatattttttgaaacatgattgtatttgtaattatattatagcagatgctactatggccattatttttcatagaaattactatcattactgctttgaccttcaggggcttgactagactaagatggagatggagaagatggtgttatgtctcccctcttacccctgacacatttccagggtacttgaggcttccataagaaacacagagatacacaaaatgacagagtgttagaaggttagatatagaaaggtctcagggatcatctgatgcaaccccttcattgtgtagcagaggaaactaagtccagaaaggttaaatgacttgcccccaatcatacaggtgactggtggaagggccaaggtggatcccaaacatccagactcttcgtaactaggccacatgaaatgctggtgggcttgacattaccatcctgctggagatgttggggagcacttgtaccacaccttcagtatccaccatggtcactcctttttgggctaggtgagcgcatgcctccttctgccaggtgtagaacttgatccatgggtaaaagagcctaggcccccactccatttccagactgaagctcagggtccccagaaactcccaggtaactccagagtctagggtgaggtatgggaacaagaatggtaagttcacacccaggaaggatttaaaaaaaaaaaaaaaagcaagcaaattaggtacatgttttaaaatataggttttattgttattcaggtatggcaaggccagagtataacttgttctactcatagatcaaatcccaagagaagagggaagtccatgccccaggggtcacagggggaagcaccagggttggtctgcctggaggcggagggagaaaccgtggcaagagtctttatgtggtttctgcaggaaggaacaggcatagcagggtaagcaagtttaggatcagctagtttgagtcattttagcaggctctggggcccagggctgtccctagatgtttggtgcctggtcccagaatgatgagggcatgaggatagtgtggaaaggggcagttgagctgtggggtctggattggttcgtgcatatgaaaggcacgctcacaggcaagttatttgctatctctaggattttgccctgggagggacattccctccccagtcagcaaggccccagatgtcaaagcatcagcatacagaaaataaaagacgtaattaatacagtccagagaaaattctggagagtgagtacgtgacctccaaaggcttcagccttagtcctcaggaagccattgaagagaagcctgggctgggaagcccctccccttccccacacctgacacctgtggccaaagactcaggtcccaagccccctgctccctcaccaggactcatttacagtactgggcaggaatgttctcagcgcttcctccagccccatgcaccatgatctcaatgttccaaggacttaagaagcagttctgccctctggggagctgggggccctcagtttcagtggtgacctgcctggtatctacaggctggcagacccagagggaaggatgcaggaatgtagatttccatcagctggctccagaatgggaggctcagaacccctgccctgtgcttctgctttcaggaatggtaggagagaggcactttgcccctgaagccctgcctggttgggccccagctcatcctcagaacacctgggcctacccctcatctttgggttttgaagctgccccagtggatagctaggagggccagagtgaagccgccaaacccagaggaatgtttggcaaacaaaagtgccgacgcagcacggggcaggcagcgtccagaggcctcttgcttgggagtgatttgcttattcatagaggagcctggtctagggaagctagactgggaccagcagagaggaagatgttggggtgaggctcaccaaggctcggtgtcttcttgcagaacccaggaattgggaccccctggctcagctgtacccatttcaccacacccctcaacctccccatgcctcattgtaccctgctggaacatgaaaggggcattaggttcataaggggctgctgaattgcaccacaaaaagggcaggaatgtgtactccctcccactacagcataaaggccgcagtgagccgctttgtttaaactcttaaattccctttggaaaggaagggttaagacttggacttgaagctctgacataatctctatgcaagtgtcagctttttttgcaatttcacacacagtcttgttttctgaacatgaagctcgtgtgtgtgtatgttggccagacgcataacatgtgtggacctgccaggacagtgtgtacttgagcagtctgagttctcagagatgccctggctgttgccgggaccccactgctcccaaagctgaaactgagctgtgctgggtgggagccaggcagagagggagtaggagtctgggtttttcttcccaagccccacgtgggccctttagtggtttctgcagtctggctgctgtcttgggcagccccagaactaaacctccacaggagagaatggcacagctcatgctaaggagggactggaccagcccagccaggattttagttggcaccagagacctccaagagaaaaaagatatcatgaactctgtgtcaaaaccaagcttctgtcccagtgcagggttaggggacacttggttagagaagagagagaggtcctacataaaacatttgaagaaggctgggcccagtggctcaggcctgtaatcctagcactttgggaggccgaagcgggcggatcacctgaggttaggagttcaggaccagcctggcaaacatggtgaaaccctgtctctactaaaaatacaaaaattagctgggcgtggtggcacgtgcctgtaatcccaactactcaggaagctgaggcaggagaatcactggaacccgggaggcggaggctgcagtgagctgagatcgcaccactgcactccagcctgggcaacagaacaagactccatctcaaaaaacaaaaaaacaaaaaacatttagagagttgcagaatcctatttttcatcagtattcaatcaacattaactgaacacctactacatactgagcaaagtgctcatctcgtaccacttcctgctccacactctacacacacacacacacacacacacacacacacacacacacacacactatgctgttctgtcctacttttttctcaaacatcccatgctcccttgtccccaggccttttggtgctgttccctctgcttggaacttgttcccttccccctccctctccttatctaggtaagtcctactcattcttcagattaaatttcattcatttcttccatgggaaaacttccatgagtcactcctaccctgcttcaggccatgcacacacacatacacacacacacacacactcatgcacacacacagacactcctagagtagctggtacttccctaccagggcatttatttttcacatctctgcatgcatccaacagtgctgtgtgccccccatgccccaggccctcttccaggactagattgtaatgcttctttgtcttccctccagactgtgtctgccgctctatagccccacctcctagcacagtgccagcacaaactagaaactagatgcccaaatagcgttggtgaatgaattaatgaagaagctaaaatgccccccactcccccaaaatttcactgccctttcctggagggctttcccatggaatggagacaagcaagtaaacccagtgacgaggcacaaaagcagagagagggtgggagagcggctgtgggcccctgggctctgtgccaggcactccgtgtgtgaatgctgcgctctggatctcttaggtgtgtaaagttgtgaacacaaccaccctcacctgcctggcaccctctctgaccacggactaccgccctggcctggacactgtggaacgcccagatgagtttggatttgtctttaacaatgtccaatccttgctaatttacaacgacaccaagtttatctactaccccaacccgacctttgaactgcttagccctactggagtcttggatcaaaagccaggatcgcccatcattctgaaggtaggagtgcccgccagagggcagtgccaccaggggcagcaatgccagagggcgccccgcgctcctggcctgactttctttctttctggctctcctttctatgcaattgaacttgcaaagctgtctccttcctacagaaggagctcatgggtagatatcgacccatcaggcgatatagcttgcacccaggcttcttaagaaatactttagaatatttctgttagttcttgtgagctttgggaaccagaggtactgcagtgagttgggagtaactgtttccttttctgtccactctgtggccacaggagcccacacacacatttccagaggtcacagtccctggcactgtccatccaagtgatttgttgccccactactttcgtgaaatcccatgcatcctcccccaaaattttctcttgtttagtgttttgtctcctctgcatttttcccactctcttcttcattttcattctctcctgcgtctgttttctctctttctctctagatcatggctgttagaagtcccctccacaaaaacttgccaaggagtcatttcctggtttttgcactgctgcccttccccgtctccttaatctctttttaagtaggcaattaacttgtgcgtgcatgtgtcaattatgcctataaagactgctattctctacagggcaaaaacctctgccctcctgcctctggaggggccaaactcaactacactgtgctcatcggagagaccccttgtgctgtcaccgtatctgagacccagcttctctgcgagcctcccaacctcaccgggcagcacaaggtcatggtgagtgagccctgcgtctgtaatgcctccttcccgcctcgtggtgcatgtgtgatctgtcctaaggaaaggctctcttctgtctcgttgcctgactcaccccctccatatctcctcatctctgggtcctacatcaaattgggtataagctgagaacacaagaaaagaaaggcagatgccgaggcaggaaattgctttttatctagagctgcactgtgtggttgtggtctgtcatgtccttcctcgcactgtaaggatctgctggcatgcccgggctctacacctgtgtgcatccatgtgcgtctgtatgtgtacaatgcacaggttcacgtgggcgggatggtgttctcgcctggctcggtgagtgtcatctcagacagcttgctgaccctgccagccatcgtcagcatcgcggccggcggcagcctcctcctcatcatcgtcatcatcgtcctcattgcctacaagcgcaagtctcgagaaaatgacctcactctcaagcggctgcaaatgcagatggacaatctggagtcccgtgtggccttggagtgcaaggaaggttagtggaagcacaccctcatttgctgggtccctctttctccacctgccttattgcccttctccctgcagacaactcctatctttactcccatcgctgccagccatgcctctgcattccactttcacccctgttttcccagaacttcttttgcttatagggtcagagatgtccaatgaagaatgcccactgcatgaggacccaggtccaattgcattgttctagtcccttctttgccctgacccatcccacaatctggcaaacactttctccctctcagggcctcaatgtccccacagtcagagtccccaggctccacagccccagactctagatcccccatgggagtgtccagctcttgtttttctgcacactgtcttcgcagcacgtgggagcagcggcagcaaaggcagacaagcacctgcctcatctcccccagggtttgttttccatcagtgctgcaggctgagcgctctgaaggccgccacttgctggtgtccttggctgtggacgtgtgtgggagtgcagattgtgttttctcccatgtcccacgcaaccacagcctcgaggtgacgagtgtacctggcgtcctctcaggctgaggacctggcaggctctctgggtaaacagctcaattaggaatgaaaacatttctccttttgctgcaaatgtcaagatcagaaacaagccctctgctggatgacagggaagagctgggctgggaaataggacatgtggagccaaggttcctcctggcaacagggctggtgagtttggcagaggaaggagccaggaagacaggtgtgccaccaccaaggtgaggcttctgaagcccttgccttcccaaactcggctctcagctgagcgtctcatgaccagacctcccctaggcttttgcatcttgatttattaccttgattagaaaagggcagcactttgcctgttctggtctttgctggaccccctcagccatggtctctcacctgcctccagcatctccgtgatctttactaaacggcccaatcatgatacttttttttccttgttgaaactacacttgtaatatgtaaagagaaaatttgaaattatagataagtatagaggagaaaataacataaaaatcacccatttccccaccacctaaaaacagctgggagtagccccgccctctggagacacactcccgtaatcctcagagtctctacaaaaggtcctcccctcgtcctttgcaaacttcttctccctctttctcctcccccgactggggcttccccacgagcctctccgtctgcttattctcatagcttttgctgagctccagacggatatcaatgagttgaccagtgacctggaccgctcaggaatcccttacctggactatcgtacctacgctatgcgagtcctgttcccgggcatcgaggaccaccccgtcctgcgggagctggaggtaatgcctgcctcctgggcccagccacccagcagggatgcaggcccagggtatcctaggaaatccagatgagactcagcagtactgagtaaggttagcagggaagaggggtcagtagtttgtaacagcatctcagcaacagagctatcaggaaggttacggctgagggggcacccaggctccttgggatggttccagggtaaagctcattgtttgtcattttttaattaatgactgaactaattaactaagatcctgcctcattctaaaatggatttaagatggcttaaagaaagacacaggattctatgaggtttgtttgttcatttgttggtttgttttactaaagataataaatcaggcagaggagattaaggggagactagtaaactgaagaagtttgagggggcatctcctattctatccttgggaaaatcaggcagcctcccctctgagagctccgcatggagcccagcctccccggcccagtgcaaggtcagagcagactgtcgaccttagagccagctgttcctacatcatcacgggtgagtggaatggggtggggttggttataggcctcaaacatagggtcctacagctagtgtcatcgccagcaggccctcagtgagaccctcaggtaggaggcccgatgcctgtcctctgagggcgtcgcctccaccacaccccaccccaggtacaaggaaacgggcagcagcacgtggagaaggccctgaagctctttgcccagctcatcaacaacaaggtgttcctgctgaccttcatccgcaccctggagctgcagcgcagtttctccatgcgcgaccggggcaacgtggcttcgctcatcatgaccggcctgcagggccgcctggaatatgccactgatgtcctcaagcagctgctctctgacctcatcgataagaacctggagaacaagaaccaccccaagctgctactccggaggtctggcccgcagcagtgggtggagagggtggcaggagtctgaacctggacagagcacctcattatagcaggccccacaagcagcatgagaaggcccactccccagaaggggcacccattcagagcagcctgtgtcctcacgtctctgcagggcagaatctgactttccctcagcccagggagactacagagtctgaagtcacccaggtgtgatggatgagctcagacccttgctcggatctcagctggagtcccagctctgcctcctgctagctctgtgatttctggccagtgttgtaaccactctgttgtttagtttcctcctagacaaaatgagaaaaataattcctatctcacagtctcttcctcccggtgcctctagagctgtgctgtccggcacagcggcccctagccacaggtagctgctacaaattaaaatgaaatagaatgtaaaatccagctcctccattgccctagcacctagccgctttctaagtgcttggttgccacattgcagctagtggccaccatacgggaccgcacagatagagaacattcccattatcgcagaaggttctattgcgcagcactgagctagggatttggacagcctagaaggccgtgccttctgagctcagcttcctggatctgaatcacagcatccactacacatgcccactgcatttttcctggcaggggagagggttggagacctcagtatcccctgagcccaccctctctagaggccgtggggagccgggcacagctttggagtcctctgggcagcaggggctggagggctccacctccgttcaccacccctcctctttagccttcctctagcaaggtctcaggcttccaggccccacgtggggtgaggagggaggaagaatggctttgctttatgagtactgagcccccatcctgccaatctgagcattagaaactctcattaagaactgttgtatttaaattagagctaatctcaagcacaatgcagggagagggtgctgggaggagccacgggagaaagctacaattttttctgccattgtcactctctcccaggcccagattgctgagcagccctggcaaatgcctgggatttactgcaaccagaggatataatttgcaccacgtgcagggagttaaaatacccctccggcatccccttcactgagggtctgtcacagccgctttgttccttcccaaatccccagatctgtagccctgggatgggaaggggaggggggccagcccttgcatgagcaaatcccctgttggcaaaacacttaagcactgctctctacctgagggctgggatccaagaccccacatgacagcaataatgacagctaatggatagtgcttagcaggtgccaggcacttttcttagcactttacaaatattaactcattcaaccctgacaacaaccactggggttggatgttattatgactgtctccatttagtgataggaatactgaaaccagagaggttaaatgacttgcccaaggtcacacagccaacgtatggcagaatcaggatttgaacccaaggaagtctaaccttgagtgtttttggaggggaagggaccaggcaccttccagataggcaaaacagggtactcacacatgcaagaaagcccagagggactgggaaactctctagttatcaccctgaggccagaagtgagttgggagaaccggttctttatagccctgtgggatagtgaggtgcctttatccatagaccctgtctcagatgcagccaaagttcagagcaccatggaccatcagggctgaaaaggccaacctctccattttcataggaaattgaggcccagaaagaagccacccctacccccaggtcacagtctagttactgggtgagctgggctgggacccaggtgtcctgactcccgccctgcgttctcccatgctccattgttctcttgggagacctcatggcaagcccaggccccaccacggagacccctctgtgaaggactgccccttaccctttgtcccttccccaggacagagtctgtggctgaaaagatgctgaccaattggttcgccttcctcctgcacaagttcctaaaggtgagaaagggagtgagacggggcctagcgtccagggcaggatggcactgctgcttagatcctggccacagggctgcatggggaccccctccctcgggagcaggaacctggactggctgtgctaaagcccttccttccactggcctcgctccgagagaggaaagggaaaacgtacaaacctgaggaggccgtgcccacacctcctgccctgcctgtgcccacaggagtgcgcaggggagccactcttcatgctatactgtgccatcaagcagcagatggagaagggccccattgatgccatcacgggcgaggcccgctactccctgagcgaggacaagctcatccggcagcagatcgagtacaagaccctggtgaggaagccggaagctccgggcccgcctgtgtatcttctacttctgccccttgctctgccttctgtccataaaagcagtctagggggtcaataaagaggatgggaggctggtctggggtgagcccaaaggacaactaagtgtaccaagagcaaggtggcaggcccgcccacccatcccaagcactctgtgcctcggtttatcctagataatattgggggagaaaaaagttcacccatcattagttattgggtaattggtattatgagaaagatgtatgttggttcctaacatagaggctttggggaagtgcatgactagtctctgatacatgtagagccatctctaaacactgagggtgcctcattccaggactatagtctcccctaagctgtccaggagctagaaagtagagtcctggtgctttgagaaagaagaattggacacaatgactcagactctcatttggcagatgttatgaaggtgagggaaactgagtcacagaccagaaaagtacccttatttcccctataaggagggtgaactttggaaaaagaagattctgaggtcctgaccctctccctcaaactactccttcaactcctgtcctgctcaccctctgtcccctacttgtagatcctgaactgcgtcaaccctgacaacgagaacagtccagagatcccagtgaaggtgttaaactgtgacaccatcacacaggtcaaggagaagattcttgatgccgtgtataagaatgtgccctattcccagcggccgagggcagtggacatggacttgggtaggaaacctggactcagagtgtgagggcaggggttgagaggtgaaggaagggaagctgccatgcacacaacccttgcaggggcatgactgtgtcctggccagctgaggcccgtgtgaaatgcttcccgctttgagcgctgcctgttcagatgtggctgtctctggggaggtctacgtgtttcctctgctgcctgggcccatggagccctagatgtctctagcctctgttattggtaccagcttgagggggccgggttgccaggtccctagagaaggtgcagtcgggagacactggctcacagccctcatccctctcacgccgctccctgcaccaccccctccacccagagtggcgccaaggccggatcgcccgggtcgtgctgcaagatgaggacatcaccaccaagattgagggtgactggaagcggctcaacacactgatgcattatcaggtgagagggggtgtcttttcccctcttcagcttcccagaatgttcccttcccgctaagccttgctctaaggcctcaaaagtctaaaaaggattttcctctccctgctttcctcctcctgctggagcatagaacagggattcttagccatggctgcccattggaattactgagggaactgataaaaaacgtgagtgaccaaactccaccctcagaaacagatttaacaggtctggggtaaggcctaggcatttctattctgtgtacctctacatttgcaaaaaaacaaaacaaaacaacaacaacaacaaaaatcaaatgcatattgcaaagccctccacatggacaactaccttaaggtacctggcactttctctctttagcatcttactaacacagcccacacctctgacttacagtggagcagggaattgaatagacttctcttcaggtcttacattcttcctcttagtagctggtgtccttgggaaaattactcaggctttcttgtctctcatgtgtaaaatggggctcctggtgaaccctgctccgtacagttgtatggaatagattcaagatagaaggtgaggtgtttagcacactggcagacacattgaatgagcagtcaaaaaaaaaaagaaaaatcccagcaaaagaacacaagatcaaggaggtatctactcccgcctcttctcccctcccatggtaaccactcgcagctgggggtctctgtaagattaagcacaggtagacaggttgggattcagaaaaaatactaaaatagaaactggaaataagagacaccaagggaaattaaaccaactagaggaagcgcctcaggctgcaagacccgtgggatcgtctgattaataacatcctcccatgtccctgtctcggaaagaaggatctgtagaggggctggcaggctgggctctcaggcactgagctgccaaccaccaggcgctggagctggcaggagcctccatgggcacagaggaagctggggcacaggggtccccaaaaatgctcttctccaggctccatccccctgactcgcctgcacctcccatcctgacaccctgcctagacccctgcccagaggacatgagtgtggtgtaatgggaagagaagaggctttagaagctgtattcaagccctgcttccccactccttggtggtgtgactttaatctctctgcaccttgggctcctcatctgtaaaatggagataacaaccctgacttgcgaaagtgtgaggtgcccaggattgtacttacagataaggtagctgtcatcactccctgttaattctgtacacatacacacatgcccaaacaccaccatttcatatggtgcttaatgtatccagtagaacaattgtaatgaaccaattaaagctgaataagaaagtacaaaagaaaatagcatgatgcccccaaatcatgagtttctaaagggcaggagtggggtctttctgcttctgtctctgatactctaatgcttgttactgggctttccagcctacggctcccaatcagaagaagggactattttgttctcatggtgctgatcatacaaagcactttcaattccctgatgtcatttatcattcatgtatgcattcagtcctcaaatatttactgagttttactgagtgcaagtcacttcccacatgctagccctgagtgacaggggacagcagggagtattcttccctttgggagactgtgatgatgatgatgatgatgctcataatagcaacgctaataccaacacttactgcgtgctcactggatcccaggcactgctcgcagcctttccgtgttttaacttctttaattctcaccacaaactacatgcaattattatccccactgaccggtaaggctcagagaggttaagtcctggagcgggtaagcagcagagtcaaggtcagacccagccaggcatcttgaccatggacttgcaccacctgttggttaagacagagaaaaaccaaggacaggagcggtttagtgactagacctgcaatcaagttgaactgtggtcatttgagtcaccttgtgaatctttcattaggtgacaagaaactataaatgataatgtaatctgttctccctgggagtgtgaactcctgcccctgccaagctttccaggtatcatttctgggctgtcagttgtaaggagaattcctgaaagacggaggtagagactgcccccctcccagtcctagtgctgatggtaccaacagctgacaagtccagggagctggtctagctgggaagtaatggagccttggcaccttccaggcacaggaccttggagctttataccatcaagtcaatgcactgccctcttgttaccctctctggagtcaaaggtccttggagcccttgcagaagaaaatctgcataatcttaattaacaaagagatgttaaaaaacttcccaggcttctgcagatttatagggagggtaaaattaaacaccaccactaaaacctgctatcagggaatctcgttagcactaatgttcatttatagtttgacttccccacatttaattcttttttggtgggagagagggactgacaatttaagacccagaaagatggttttatgactggtgcagctataaatcaaacttataaagttcataaaaattgttaaaataaaaaatggtttaataggaatgttttatggcccataacattattatagctgttttattccctctgcgttaggggtttaattggatcaccacgattctggggattctctgtttttactggatggagggcaatcttaaatcaaaatggccccaaatgtcttcagtatggctcctcacttatccgccctctcctgcaggctgggtgctgagctggggtaccctcatagaggatgggacaagacaccatctttctcgctcagtccccaagagtggctgcccttttgatgaaactatttgaagtgatccaggcattataggacccaggtcagaaagaaagcagagccaaaagggaaaatgggcttcagaccagtgtgactcgaaataaaattccaagttagaatatataatgaagagaacatgtgctctggagcctgacatacctggctacaaatattggctctaccatgtatgaattatgtgacctttaagaggttgcttagcctccctatgattccatttttttttttcatctgtaaaatgggaatacttgtgcatagctcgccaagtggatgggagaatgggtctggcccagtgctgtccagtagaaaattaatgcaagccacatgtgcaagccacatgtgtaatttaaactttttgtattagtcacattaaaaaggtaaaaataaaaagatcaattaatgttacatattttatttaatctaactggtctaaaatgattatcatttcaatatgtaatcaatttaaaaattatcaataagatagtttatatttgtattcatactgtcattgaaatccagcatgtaatgtatatttatagcacatctcaatttagacacagctcatcttagttgggattaaccacatttcaaatgctcaatccacacacatggcaagtagctatttgattgggttatgcagctctaacccaataaaagctcaaaaaacagcagtaatggttgtttctggtattcctgtactccttgctctctaccccacagctatcttataaccctctagaaatacttgactatccaacttcccaagacacctacattcaccttttgtactgtaccttttgtacccttctcaggtgtcagacaggtcggtggtggctctggtccccaaacagacctcctcctacaacatccctgcctctgccagcatctcccggacgtccatcagcagatatggtgagaaccacgagggcagactgggcagctcagagcagagtcttctgagacctagcagggcccactcgctaccccttctaacagcaggcagcccttgctgctgctggcccaatcacaggctcctgccagttggtttctgtcctccctagtccaggcattcccaggcagcctgcgccctcagagccgtgggagcaggtggcaccatgtgccctttgtttgatatcccagcctggtagaggagtcggagtggcccagaaccaggaaggcacctggctgggggttcatatatcccaggttgcctgggccagtccagtttatgcttgttgtcctggctgaattattaagagtgcccccttttactctcagaagtgtcccagtttgatcaataaattagtccgaggagtactggggcccccaggccctccgggcaatgaggttatggcacctccttgtcccttattttatttgctctggtttcatgtatgcactaaggccttgggcttctcaaccaaagggcaccacaggactgaacccagcagcaccaaaaagggctcaggaaatcccataccccaggccccatgcaagaagagacccttaactcccaagaggagaattacaacttgcagctctttagtatccagatttctattaaaacaccgacgaaaatatcctattgacattttacctattaattattcattgctgggagtgtcagagtagaggggactcccaaattcccaaggatgtctctaattcacaaaatttataaatccttttctaaaaaagccttcaggctcttccgtcctcatgccaaccaaggatccctaaaataacctaccatatatgaggtcccaacggtcccctttcagctgaaatgagtttattctgagtggatgcagcaggcgggcagggattctggaaggattctacaagcaaggctggtgactgttactcacagccctccaccaaccccttctcctcagactcctccttcaggtatacgggcagccccgacagcctgcggtcccgggccccgatgatcaccccagacctggaaagtggggtcaaggtgtggcatctggtgaagaaccatgaccacggtgaccagaaggagggtgaccggggcagcaagatggtgtccgagatctacctgacccggctactggccaccaaggtaactccccctctgcccagaccagggagtgcttgttaaaggagcacatcctgcccctccacaacacagaaaggatgtctggagtgtgtccttcaagaggacccattcagacagtccaggtacagccagacctggtggctcatgcccataatcccagcactttgggaggccaaggcagaaggatgccttgagcccaagagtatgggaccagcctgggcaacatatcaagacccgatctccactaacgaaaaaaaaaaaagaggacaaaactggaaaaaaaaaaagagagagagagagatagtccagttccctgggcagggcttccaaaggatcaggccaccgctgttctctaccctttggcaaaaatagcaaatatatctttgctttctgcgtacttcttgagactactgtttcacttcagaggagtaactctctccctctggaccccttaagctttaggaaggcagtggggtttcttgctgatattagttggatagatatgctggcctttctatcccctttctggccacaatgggagggaaagcacagaggcctggccctgccagtaatccaaggggaggcttcctcttcccatcccatcccaccccagctacccccaaatgttgatggaagtgaggcttcatcttttagccttcctagcaggtagcaaaataagcctgtaagtatgacaatcaaagagccaatgttttccacgcagggctagatttcaaatattctccccgatggaccctccaacaatggcactgaagttttaatacagtggcatccaacttacagctctcacacttgctcccagagtggcccagaaatattccacgagaccccatgtctccattttagctttgcctaatatgctcagcataacaacaagagaccaacaaagagataacagaaaaagctagaggtttctgctgaccctcagaggtgtgccatgagcctgtaaactgtgggagccaggcccagtcttattcctgccccagagaccctccaaagccctgtggatcagcactctgcctgtggggaggtggttcttgagtctagacccttcacccacattccacattccagataccacttgtctcaggtcactaacatcctaagcctcttcataccttcctaacagactctcctggtcctgctgtgctcctgccaggaggcacccagtcctccagcttgttcctcggacactgtttccggactggcttgcagcctgtgccccctcattcacccatgggaagcccggacccggggcacttcctgtcttcctgtcaaagaccctgagcctacaccctgtgtggaatgtggaatgtggctgcaggttggaggagagattcttccccaggattcacagcccacccagtttctcccacctccccagctaaccaatagtacccttccccaccccgcaacactgcctgcacagcctcgtgtcccagacaaatttccaaggcaggatgggtccaaggcaccatctggtatgcctgtctgctacctgccgtcacccccctccatcttactctcccccacccctcctccagggcaccctgcagaagtttgtggacgacttgtttgagaccttgttcagcactgtgcaccggggcagcgctctccccctggccatcaagtacatgtttgatttcctagatgagcaggcagacaggcacagcatccatgacacagatgtgcggcacacctggaaaagcaactggtaaaccctcggggagctcagcaggaggtgcagcctggagaggcctggagctaagagggatgaggaccaggagatgggagggtgggaggatagcctattctcggctggggctgggtgatccaaagctcctggaacaaacagtgcacatatgctctgcagagcccacacggtccccagctgcctgtgccaagtggggcctgcctggcttgaggcacagcaataggatgcacccttgaattctgcccctccaggttgtgaccagtaccccaagaagagcctcctcccctggctctgagatctctggttctcaggagaagggagctgggggaacctatgcaaagagctgcatttgaagcctgcagcagagcttcacagccagacatcgtggggcattctgagtggggcagttctaaggcacttcctgagatggggaatccctgaattaaactgagacgcccggtgaagttggtcagcaccggagagggagttcacacctgctatagacttgagcccactgacagggaggatttcattgcaaacttgatctcttaaggccaagtgattatcctggcgccatagctttcaggaagcagcaggcagaatgccctgcaggcatgactctctcccctaaagtcatctctgcaaccagaccagcagtgggagaagccctcaggcccctggtatgagactttatcctcatgggttttgaacctggaccacagaccaagctaaggactggctttcaggtcagacaggacccggccaagagctggcatcaaaaggcttcctttgggaaagagcacagagaggggagaggggaggtccaggcatttgggttgggcaggcagcccacgcagctgtctggagtcagcggtctcctcagaaaacagagccgacacagatgggcccaggctgttatttgggaatcaaaagtcctagcaaccaacaaaacactttggaaaaagccaaccccagccccatctcttccttcctcctcccgggtcttgtggtcgctgagccttcctcagtctgcagctttgatcacagtggagtgaaacgaacaggctggggtggccctggggttaagagcccacagtccactttgccaggacaggccttccatctgcattccctggacagcacatgcctgtcccctttgctttggagcatccccggcccagcgctgggagagggcacttcaggggaaatcaagagaaagtccagggttatccgcatctctgtgccttctgtgtgctggccagatccaagtaatagaaatggactaccctggcatcgtggtgtggagagagtttccttaaccagacctcaatagcaaatgtccagggaaagattaccagaaactacccaaggctgccagaagaaggggagggtagaagagatgagtcagctctcagctgcagcagcttctcccaggctagaggaaagtgagggatcctgttgtgttttggaagataggcagaaatcatcgtggaagggcttgaggctgggtaaagcagatcttccccaagacctggcactactgagacatttgggaaagtttggggcccatgagagtcaagagaagatgaaggaggggagagaagaagaagctggggagctgggaacatcatctcaggctggaggacaagcctgcgacaggaccggttccacagaggagtcaaaagagttaaagcccagaaggcagctggaagagaaggcaaagctggaaaaggaagtaaaagcagcagctgttctgattttgaaggagagtaaatgggcttatttgctttatggtctaaggagcagagaaaactcattctcctctggttataaattcccgagttgcagaaggaagtctcctaactactgatcggttcctcttggggtgggaaaatctctgagctacagtgagtcattcccaggatgccaacaatggcctccacttctccctctgcccctgcccagatacaagtacgccctggggagagtcatgaaagaacttcccccaggggagcccattcctcggcccagccaggccaggccagccctgggaagtagcttgggcagccgggctgggcggggagcgcaggtggagccctttgtgcccgctccgaggctgagcctggggctcctggctgccttcttccggacaatggccacgggcactgtgaagggactccaggagcctggtggctttgtgtgaagccctgagaaaatgtgctgtcctctgttcttgggcttgcctaggggcacagaggcctttagaaaagtctcccagaagggaacagaacacacccaggcccacccctcggatgttagagatcagggtcagtgcccccattagggtacaaagtgcctctccttccatttctcccaggtcagtaacagctttggctaaattaaccctggctggacccattttcttccattttactcctttgccccttcaggtggacaatttgacctttgatggggaagaatatcagtgggcagcagaaggggcacggcccgcatgcattctcaagtcttctctgcctttccccacagcctccctctgcgcttctgggtgaacgtgattaagaacccccagttcgtgtttgacatccacaagggcagcatcacggacgcctgcctctctgtggtggcccagaccttcatggactcttgttcaacgtcagagcaccggctgggcaaggactccccctccaacaagctgctctatgccaaggacatccccagctacaagagctgggtggagaggtcagtagcaccctcaggacaggcccatgcccttgtctccctgcccattccccgctctatagtcatcactgactaaggactcagacgacggtgtctgtcatctcttcaggacctcccactcccctccctgccacaccccctgctgcgggaggaagggtggctttgtgcccgtggaagtcagatgattatcatcctaattactattcattgagcatgtgctaagcattcagcattctgataaagattttgtgtgtatcatctcattaaaatgtccagcagagttgtgaagccagtattattattatccccattttactgataaggaaactgaggtacagagagggtaaataacttgccctgcgtcacacagctagcaggtagcagagctgggatttgaacacaaagagcctggtgagagtctgggcttttaaccactctgttgggcaccgcagccacgagctctcggctagatggaatctactgaagaaactctggccttcagcctcaacctcagcatgaagcaagaggccagaggaagccacatcagaagagaaatagggaggcaggagcaactgggtacatcagtgccctcgaaggacctgggcccggggtagctataggtaaatgtttgctgaggcctccaccaaggcgcctatcctgtctctggcagatactacgcagacatcgccaagctcccagccatcagtgaccaggacatgaatgcctacctcgccgagcagtcccgcctgcacgccgtggagttcaacatgctgagtgccctcaatgagatctactcctatgtcagcaagtatagtgaggaggtgagacagggccccagcagggacagaaaccaacaggcaaggagcaggaagcctgactcagtccttaaatagatggcaatttagaaaacacattcagggagtcagaagcccatgagctcgaaaattatcattcctttatgaggcaactcaactcctgattcactgaaggctttatacacttcattgtctttcactcattgttaacacaataaataacacttttaatcatttgtttttcagttcaaagtatggtataattaatttcattctctcttaatgaatcgaactattctttgcattcgggcagatcctgtcagttacatttcagatagacaggtggaccctaatatgaatagagattgattaggatacctttggaaaactcacaaagcttctttagcattgaacgtgaaagtagtagtagtagtagcaataattaacacttgcatagcacttcctatgccagagaatgtttgaaacaccatacatacatacatatatataggtgtgtgtgcatgtattcattcagttaatcatttaaattatttaaggttatgtgcatgaaggcagaatggaaaggtagacagagggcaaagagggaacgactccagaaaatggtgtcttctattctgagtcctgaagtcttcctgcctttgtttttgctcctcagctcatcggggccctagagcaggatgagcaggcacggcggcagcggctggcttataaggtggagcagctcattaatgccatgtccattgagagctgagaggaggagcctcgcattcctgggaagagggacctgtccaagctgtcacactgggagtctcagatggaaggacaagtgatggggatcaggccccagagcttgctgtcccctgagaccccatcctggggagaggggaggactcctctccctacgccagccaagtttcgtcatagccagttccagctgggagagacagtgggcgtcgtccatcctcagtgagaacaccagagaacccggggccgggagaaggtggttcttcaagccgagaggcacgagctggggacagttctgcctctgtgactgctgctttgcatgaaaactcatttgatgtatattggggaaataatgagaactttatttaatttttttaagaaaaagggaaaaaaacagaaataaaacaaaaagccgccctgttaatcccgtccaacttttgtttaattctgatttctgtctcccttccttcttttctcccattcctccttctttatataatgcctatttccaaatgccagagaaagcagagatgctgagagacattggagagaaaatgactgtctccttttccttgaaattaaaaaaaaaaaaaaagagagagaaagaggagaagaagaatgatgagcacaagtatgcaccaaacacttcgcaaaaacagaggccagtaaaacctggaattatcccggcagccagaggagtatggaacttccagaactttgcacaaattgcaaagccatcaagagctcaccctggctgactggaaactgagctttatctaccacacacctgtatattctcatcttttgagaggagatgtgtacctagatagtaccaatgctttttgctactgttttttgttttgttttatttaatcctaaacctcaacaaatgaggagctggtctttgatatgtttcctttcaatttccctaaagttactatgagaagtggggtgaggtgggcctctcccagaccagacacctggcagccctgcctcatatcaatccctgtcataaaccaggcaccctggggaaacggcctggaggtgtgtgggccaggcctccacgaggttccatttgaaagttgatttggagacataggtgtttgactttggagttcactccaatcatccagtggtccctggcaattaaaaagaaaacaaaaatcaaacactgtttacagcaagcaatacttgaagagcataggttacagaagctgcagtatttattattatgctttctttctttcattctctcgtgcctggagaggggagaccacccttcgctcatatacggaagctcctgaccatctgggcctacagcacttcctcagtagaaatgactgtggcatgcccacgttactaccttctgcctctctttctgcctctcacggacttgtgagtgtgaaggacaagtggatgacttctcactggactttccttctctgtctcttctgatgatgcctaaaactatggataaccaattctcctgagtgtagattccaaacaaagagaccaaagctccatgcccaggtccaaaggccccatagaagccagtgggagtcatcgagaggaaaggcgctctgtgagtgtcaggaccttggtggccaggatagccatcagagtgtccaggcctcccacattaccttggatccgagcagccagctccaactgttctgcaagcagcactggagtcagggggtaggaggacaagtggaagcaaaggtgtgggactggggaagacaaagaggaacaagctgcccttcctcacttttcaaagggtcaggaatcctaggctatgatgctgggaagctagaccagctcctccaagagagactagaccagggtcattttctctgttattaactctgggctccagcttctccgtgccctgctttacctccaagtggttccaatttccaaaggccctgctgaccacatgtgattcccaggagagggctgggggaggggagcgcagaggtctggcttccatccttggcgtgtagctttggatcgctgtctaaccacacagcagacgttgcccggtctccccagctctagtttcttgcctgaatgcggctgacaaatgggaagagaaaagcattcagcaaaatactcaggaaacttgctgttttcattataattcacaaccagccatgccaaggccactttcttttgaaaatccacttctttaaagtttctcaggccctattagtagcctgaaggaaatactaatgactggccttccgcactaagccaaagtgtttgctcttcatagcactcaaagcttatcagcgcagagcccataatttatggagataaaaggaaaggagatataggtaagaagagtgtgaccaggagaccttatgctacctgtaaaaaagttcagcccaccccatctaacttctgagctctgtttgggtgaagattttctggccacatggctgctcagactggcatccaggctttgctccaccaagaagttaaaggcagtcggacatctcagtagcatctctaccagcccttaactcaatgcatctacctggcatctcccagcagttacttttggagacgattcactgcccctggggcgtttccttgaaggtttgtggagagcgtggagaatgatggggcaatggccaattggagggtggagagtgaagagccggagctggctgtgagtggtttggccacatttctcaggattccatgagagagttggggaacttgggctgacaaaggaagtagcctggggcatccttaaggaaggaattaagaaaagggaaaaagctggactcaagccacgccatgagggtgaaaggttataaggccctgccccctttccagctgcccacctgttcctcctccacacctcttcgctttgggccaccaagaaccaatgaagtccacaccctttggatgagaaaaagagggagttggttggcctctcttctccctgttatccaatttgaggatattttgaccttgggtaaggatgaagtgttaaagccacagctcctctccacaagaagccattcatcttgggggaggcagagagggaagtctctctccaaagtctatccagcttcgcttcgtttcattgatctgcacaagagacaatgctctggaaaaggaagaggaccccagaagggtgcttggcaagacagaggatgctaatgggcaatggagagcactccctccagctggcccctgctgctgcctcccgtcctctgcatggggtcaggtgcttctgtgcttgctgtcctacctctctccacagcagggctctcaaaaccattttgatcccccattggcagagggttcccctctttacagagttcagtcattaaaagcatggatcagctgttaatctcattggaggagggaactgtttcctgcattcattcatctgggaaccttcttgagtagccactgtctgccagccactgctctagagatgggaaaacagcacggaacaaaaccaaggtctttcttccagcgaatttatatccttcaggaagctggttcctgccaccaacttagcaggcaacagttctcctcccctagtggcacagggtaccagttttgtaggaaaagtggtccagcaaaggaagaaagcagaccaacccagctgccttaccttattctggggccattcccccagcgatgagagctgctcttgtttctactgccaccatctcttctggctgcacttcacctgctgcttgagcttctgaccttccttcagttccaccaaatgaggacaggaaatagcagtcaagacccctggccctgctgagcgtgaaacagaagcaatggatgagtgctggacgaagaatggcctgggcagaacaaatagggagcatttgaaagcttctggctgataaatctccaggtgcatcccggttgccacgcctgcccccattaacctgctcctggtaaatactgatccagcagctgctccaggagaggccgtctttttttcccagccacgctgtgtcttgcatgagactcctggggcctgggcacagagagaaaagaattgagactcaggaggctcagtgggtgagaaaatgcaaagtggcttcacagacacagggctgtgggagcagatcgacggggaacttgggagatgaacttcagggccttccgacgccttgtctcaggaacatgctttgagaaaaatggtagcatcctttccataactcagtctctcttccctagtttccctgaagtgtgacgttttagtatctggagctcagtgatccccatgaatgagggataaagtttcactcttggtattttctaactagtgctagggaaagtcctgagacacgatcacagccactgcttggcatacagggcctccacccaataagcaaactggagattcctcagcctctcgtggacacccacatctcattcttctcacagcagagaagctctcccttcagcctgagctgtcttctttctgctgcagtgcagcctgctccctcctaccctggcctcaaggaaggtgggaaacatcttctgcatttcaaagtcctcactttgacttatttggccttcatcttggcatggaaggtggcaggcagaatggaaatactccccccaaacagaacagatattcttgcgtgtgtaagggcagaagggacaagctctctatcccatgagactaggggccggagcccacctgcctttccccacaacttttcctgctcaaacccactcctcttgacacactggaatctgtattatatatatttttaagaaaatacaatgatggttgtctggttttgttgtttttacaggtgttgtggaataaaaactgtaagaaaattaagtatttaaaatgttccaataaagtggggttttttgttattctaatatattattgtgtacctattgtaaatatgaaacactcctattttgcaagctgaggacacaatttgtactgttgttatatataaataaagtttactgaatt

SEQ ID NO: 19 - DNA, 11412 bp, Homo Sapiens
ccgccgccaccgcgggagccagagctgccgggaggagcggcatccgcgccagactggagcgggagggcggcggagggcagttgctgggaatttttcagccgagagggcgagcgatccggagagagaccccgagagcttgggagcggtagggcgtgcgagcgccgcagccagcggagcaaacctcgaaatagatctggaaagccaggctcccggaggaaatgggactgtgaacgaaccggagagcaagaagggaaggaagcgccgggattgctgatgtcagaggagcccggaaagtcgcgctggaaaaatctgaagacagccggggctctgcttcttcctcaggagagacaccgccggccgcccccacacgccccctcggcgcctccgggtgccccctgagagccggcgacagcgcccagccgggctgctgcggggcgacggaggactgaggggcgcgcggagcggagaccgaggagcgacttcaggaatacagataagtgtctggtggcttgacgtggattttaatgaatttggactccatgtggatttggtcgtctccctgattccgagctgcgggcagggagaggggcctcgcgccgccctcagcagccggcggcggccgaggtagaccgagcggggacggaaggacagaccgacgtcgccgagctggaatcatgtgagggccaaccggggaaggtggagcagatgagcacacacaggagccgtctcctcaccgccgcccctctcagcatggaacagaggcggccctggccccgggccctggaggtggacagccgctctgtggtcctgctctcagtggtctgggtgctgctggcccccccagcagccggcatgcctcagttcagcaccttccactctgagaatcgtgactggaccttcaaccacttgaccgtccaccaagggacgggggccgtctatgtgggggccatcaaccgggtctataagctgacaggcaacctgaccatccaggtggctcataagacagggccagaagaggacaacaagtcttgttacccgcccctcatcgtgcagccctgcagcgaagtgctcaccctcaccaacaatgtcaacaagctgctcatcattgactactctgagaaccgcctgctggcctgtgggagcctctaccagggggtctgcaagctgctgcggctggatgacctcttcatcctggtggagccatcccacaagaaggagcactacctgtccagtgtcaacaagacgggcaccatgtacggggtgattgtgcgctctgagggtgaggatggcaagctcttcatcggcacggctgtggatgggaagcaggattacttcccgaccctgtccagccggaagctgccccgagaccctgagtcctcagccatgctcgactatgagctacacagcgattttgtctcctctctcatcaagatcccttcagacaccctggccctggtctcccactttgacatcttctacatctacggctttgctagtgggggctttgtctactttctcactgtccagcccgagacccctgagggtgtggccatcaactccgctggagacctcttctacacctcacgcatcgtgcggctctgcaaggatgaccccaagttccactcatacgtgtccctgcccttcggctgcacccgggccggggtggaataccgcctcctgcaggctgcttacctggccaagcctggggactcactggcccaggccttcaatatcaccagccaggacgatgtactctttgccatcttctccaaagggcagaagcagtatcaccacccgcccgatgactctgccctgtgtgccttccctatccgggccatcaacttgcagatcaaggagcgcctgcagtcctgctaccagggcgagggcaacctggagctcaactggctgctggggaaggacgtccagtgcaccaaggcgcctgtccccatcgatgataacttctgtggactggacatcaaccagcccctgggaggctcaactccagtggagggcctgaccctgtacaccaccagcagggaccgcatgacctctgtggcctcctacgtttacaacggctacagcgtggtttttgtggggactaagagtggcaagctgaaaaagattcgggccgacggtcccccccatggtggggtccagtacgagatggtctctgtgctcaaggacggaagccccatcctccgggacatggccttctccattgatcagcgctacctgtacgtcatgtctgagagacaggtcaccagggtccccgtggagtcatgtgagcagtatacgacttgtggggagtgcctgagctctggggaccctcactgtggctggtgtgccctgcacaacatgtgctcccgcagggacaaatgccaacaggcctgggaacctaatcgatttgctgccagcatcagccagtgtgtgagccttgcagtgcatcccagcagcatctcagtatctgagcacagccggttgcttagcctggtagtgagtgatgctcctgatctatctgcgggtatcgcctgtgcctttgggaacctgacagaggtggaggggcaggtgtccgggagccaggtcatctgcatctcacctgggcccaaggatgtccctgtcatcccgctggatcaagactggtttgggctggagctacagctgaggtccaaggagacagggaagatatttgtcagcaccgagttcaagttttacaactgcagtgcccaccaactgtgcctgtcctgtgtcaacagcgccttccgctgccattggtgcaagtaccgcaacctctgcactcatgaccccaccacctgctccttccaggagggccggatcaatatttcagaggactgtccccagctggtgcccacagaggagatcttgattccagtcggggaggtaaagccaatcacccttaaggcgcgaaatctgccccagccgcagtccggccagcgaggctatgagtgtgtcctcaacatacaaggagccatccaccgggtccccgctctgcgcttcaacagctccagcgttcagtgtcagaacagctcgtaccagtatgatggcatggacatcagcaatctggccgtggatttcgctgtggtgtggaacggcaatttcatcattgacaaccctcaggacctgaaagtccatctctacaagtgtgcagcccagcgggagagctgcggcctctgcctcaaggccgaccggaagtttgagtgtggctggtgcagcggcgagcgcaggtgcaccctccaccagcactgtaccagcccttccagcccctggctcgactggtccagccacaatgtcaagtgctccaaccctcaaatcaccgagattttgacggtgtctggaccgccggaaggagggacgcgagtgaccatccatggcgtgaacctgggtctggacttctccgagatcgcccaccatgtgcaggtggctggggtgccctgcacgcccctcccaggggaatacatcatcgctgagcagattgtctgtgagatgggccatgccctcgtgggaaccacctccgggccagtacgcctgtgtattggcgagtgtaagccagagttcatgacgaagtcccatcagcagtacaccttcgtgaacccttctgtgctgtcactcaacccaatccgaggtcccgagtcaggaggcactatggtgaccattaccggccattaccttggggctgggagcagcgtggcagtctacctgggcaaccagacctgcgagttctacgggaggtcaatgagtgagatcgtgtgtgtctcacccccatcatccaatggccttggcccggtccctgtttctgtgagtgtcgaccgagcccatgtggatagcaacctgcagtttgagtacatagatgaccctcgggtccagcgcatcgagccagagtggagcattgccagtggccacacacccctgaccatcacaggcttcaacctggatgtcattcaggagccaaggatccgagtcaaattcaatggcaaagaatctgtcaatgtgtgtaaagttgtgaacacaaccaccctcacctgcctggcaccctctctgaccacggactaccgccctggcctggacactgtggaacgcccagatgagtttggatttgtctttaacaatgtccaatccttgctaatttacaacgacaccaagtttatctactaccccaacccgacctttgaactgcttagccctactggagtcttggatcaaaagccaggatcgcccatcattctgaagggcaaaaacctctgccctcctgcctctggaggggccaaactcaactacactgtgctcatcggagagaccccttgtgctgtcaccgtatctgagacccagcttctctgcgagcctcccaacctcaccgggcagcacaaggtcatggttcacgtgggcgggatggtgttctcgcctggctcggtgagtgtcatctcagacagcttgctgaccctgccagccatcgtcagcatcgcggccggcggcagcctcctcctcatcatcgtcatcatcgtcctcattgcctacaagcgcaagtctcgagaaaatgacctcactctcaagcggctgcaaatgcagatggacaatctggagtcccgtgtggccttggagtgcaaggaagcttttgctgagctccagacggatatcaatgagttgaccagtgacctggaccgctcaggaatcccttacctggactatcgtacctacgctatgcgagtcctgttcccgggcatcgaggaccaccccgtcctgcgggagctggaggtacaaggaaacgggcagcagcacgtggagaaggccctgaagctctttgcccagctcatcaacaacaaggtgttcctgctgaccttcatccgcaccctggagctgcagcgcagtttctccatgcgcgaccggggcaacgtggcttcgctcatcatgaccggcctgcagggccgcctggaatatgccactgatgtcctcaagcagctgctctctgacctcatcgataagaacctggagaacaagaaccaccccaagctgctactccggaggacagagtctgtggctgaaaagatgctgaccaattggttcgccttcctcctgcacaagttcctaaaggagtgcgcaggggagccactcttcatgctatactgtgccatcaagcagcagatggagaagggccccattgatgccatcacgggcgaggcccgctactccctgagcgaggacaagctcatccggcagcagatcgagtacaagaccctgatcctgaactgcgtcaaccctgacaacgagaacagtccagagatcccagtgaaggtgttaaactgtgacaccatcacacaggtcaaggagaagattcttgatgccgtgtataagaatgtgccctattcccagcggccgagggcagtggacatggacttggagtggcgccaaggccggatcgcccgggtcgtgctgcaagatgaggacatcaccaccaagattgagggtgactggaagcggctcaacacactgatgcattatcaggtgtcagacaggtcggtggtggctctggtccccaaacagacctcctcctacaacatccctgcctctgccagcatctcccggacgtccatcagcagatatgactcctccttcaggtatacgggcagccccgacagcctgcggtcccgggccccgatgatcaccccagacctggaaagtggggtcaaggtgtggcatctggtgaagaaccatgaccacggtgaccagaaggagggtgaccggggcagcaagatggtgtccgagatctacctgacccggctactggccaccaagggcaccctgcagaagtttgtggacgacttgtttgagaccttgttcagcactgtgcaccggggcagcgctctccccctggccatcaagtacatgtttgatttcctagatgagcaggcagacaggcacagcatccatgacacagatgtgcggcacacctggaaaagcaactgcctccctctgcgcttctgggtgaacgtgattaagaacccccagttcgtgtttgacatccacaagggcagcatcacggacgcctgcctctctgtggtggcccagaccttcatggactcttgttcaacgtcagagcaccggctgggcaaggactccccctccaacaagctgctctatgccaaggacatccccagctacaagagctgggtggagagatactacgcagacatcgccaagctcccagccatcagtgaccaggacatgaatgcctacctcgccgagcagtcccgcctgcacgccgtggagttcaacatgctgagtgccctcaatgagatctactcctatgtcagcaagtatagtgaggagctcatcggggccctagagcaggatgagcaggcacggcggcagcggctggcttataaggtggagcagctcattaatgccatgtccattgagagctgagaggaggagcctcgcattcctgggaagagggacctgtccaagctgtcacactgggagtctcagatggaaggacaagtgatggggatcaggccccagagcttgctgtcccctgagaccccatcctggggagaggggaggactcctctccctacgccagccaagtttcgtcatagccagttccagctgggagagacagtgggcgtcgtccatcctcagtgagaacaccagagaacccggggccgggagaaggtggttcttcaagccgagaggcacgagctggggacagttctgcctctgtgactgctgctttgcatgaaaactcatttgatgtatattggggaaataatgagaactttatttaatttttttaagaaaaagggaaaaaaacagaaataaaacaaaaagccgccctgttaatcccgtccaacttttgtttaattctgatttctgtctcccttccttcttttctcccattcctccttctttatataatgcctatttccaaatgccagagaaagcagagatgctgagagacattggagagaaaatgactgtctccttttccttgaaattaaaaaaaaaaaaaaagagagagaaagaggagaagaagaatgatgagcacaagtatgcaccaaacacttcgcaaaaacagaggccagtaaaacctggaattatcccggcagccagaggagtatggaacttccagaactttgcacaaattgcaaagccatcaagagctcaccctggctgactggaaactgagctttatctaccacacacctgtatattctcatcttttgagaggagatgtgtacctagatagtaccaatgctttttgctactgttttttgttttgttttatttaatcctaaacctcaacaaatgaggagctggtctttgatatgtttcctttcaatttccctaaagttactatgagaagtggggtgaggtgggcctctcccagaccagacacctggcagccctgcctcatatcaatccctgtcataaaccaggcaccctggggaaacggcctggaggtgtgtgggccaggcctccacgaggttccatttgaaagttgatttggagacataggtgtttgactttggagttcactccaatcatccagtggtccctggcaattaaaaagaaaacaaaaatcaaacactgtttacagcaagcaatacttgaagagcataggttacagaagctgcagtatttattattatgctttctttctttcattctctcgtgcctggagaggggagaccacccttcgctcatatacggaagctcctgaccatctgggcctacagcacttcctcagtagaaatgactgtggcatgcccacgttactaccttctgcctctctttctgcctctcacggacttgtgagtgtgaaggacaagtggatgacttctcactggactttccttctctgtctcttctgatgatgcctaaaactatggataaccaattctcctgagtgtagattccaaacaaagagaccaaagctccatgcccaggtccaaaggccccatagaagccagtgggagtcatcgagaggaaaggcgctctgtgagtgtcaggaccttggtggccaggatagccatcagagtgtccaggcctcccacattaccttggatccgagcagccagctccaactgttctgcaagcagcactggagtcagggggtaggaggacaagtggaagcaaaggtgtgggactggggaagacaaagaggaacaagctgcccttcctcacttttcaaagggtcaggaatcctaggctatgatgctgggaagctagaccagctcctccaagagagactagaccagggtcattttctctgttattaactctgggctccagcttctccgtgccctgctttacctccaagtggttccaatttccaaaggccctgctgaccacatgtgattcccaggagagggctgggggaggggagcgcagaggtctggcttccatccttggcgtgtagctttggatcgctgtctaaccacacagcagacgttgcccggtctccccagctctagtttcttgcctgaatgcggctgacaaatgggaagagaaaagcattcagcaaaatactcaggaaacttgctgttttcattataattcacaaccagccatgccaaggccactttcttttgaaaatccacttctttaaagtttctcaggccctattagtagcctgaaggaaatactaatgactggccttccgcactaagccaaagtgtttgctcttcatagcactcaaagcttatcagcgcagagcccataatttatggagataaaaggaaaggagatataggtaagaagagtgtgaccaggagaccttatgctacctgtaaaaaagttcagcccaccccatctaacttctgagctctgtttgggtgaagattttctggccacatggctgctcagactggcatccaggctttgctccaccaagaagttaaaggcagtcggacatctcagtagcatctctaccagcccttaactcaatgcatctacctggcatctcccagcagttacttttggagacgattcactgcccctggggcgtttccttgaaggtttgtggagagcgtggagaatgatggggcaatggccaattggagggtggagagtgaagagccggagctggctgtgagtggtttggccacatttctcaggattccatgagagagttggggaacttgggctgacaaaggaagtagcctggggcatccttaaggaaggaattaagaaaagggaaaaagctggactcaagccacgccatgagggtgaaaggttataaggccctgccccctttccagctgcccacctgttcctcctccacacctcttcgctttgggccaccaagaaccaatgaagtccacaccctttggatgagaaaaagagggagttggttggcctctcttctccctgttatccaatttgaggatattttgaccttgggtaaggatgaagtgttaaagccacagctcctctccacaagaagccattcatcttgggggaggcagagagggaagtctctctccaaagtctatccagcttcgcttcgtttcattgatctgcacaagagacaatgctctggaaaaggaagaggaccccagaagggtgcttggcaagacagaggatgctaatgggcaatggagagcactccctccagctggcccctgctgctgcctcccgtcctctgcatggggtcaggtgcttctgtgcttgctgtcctacctctctccacagcagggctctcaaaaccattttgatcccccattggcagagggttcccctctttacagagttcagtcattaaaagcatggatcagctgttaatctcattggaggagggaactgtttcctgcattcattcatctgggaaccttcttgagtagccactgtctgccagccactgctctagagatgggaaaacagcacggaacaaaaccaaggtctttcttccagcgaatttatatccttcaggaagctggttcctgccaccaacttagcaggcaacagttctcctcccctagtggcacagggtaccagttttgtaggaaaagtggtccagcaaaggaagaaagcagaccaacccagctgccttaccttattctggggccattcccccagcgatgagagctgctcttgtttctactgccaccatctcttctggctgcacttcacctgctgcttgagcttctgaccttccttcagttccaccaaatgaggacaggaaatagcagtcaagacccctggccctgctgagcgtgaaacagaagcaatggatgagtgctggacgaagaatggcctgggcagaacaaatagggagcatttgaaagcttctggctgataaatctccaggtgcatcccggttgccacgcctgcccccattaacctgctcctggtaaatactgatccagcagctgctccaggagaggccgtctttttttcccagccacgctgtgtcttgcatgagactcctggggcctgggcacagagagaaaagaattgagactcaggaggctcagtgggtgagaaaatgcaaagtggcttcacagacacagggctgtgggagcagatcgacggggaacttgggagatgaacttcagggccttccgacgccttgtctcaggaacatgctttgagaaaaatggtagcatcctttccataactcagtctctcttccctagtttccctgaagtgtgacgttttagtatctggagctcagtgatccccatgaatgagggataaagtttcactcttggtattttctaactagtgctagggaaagtcctgagacacgatcacagccactgcttggcatacagggcctccacccaataagcaaactggagattcctcagcctctcgtggacacccacatctcattcttctcacagcagagaagctctcccttcagcctgagctgtcttctttctgctgcagtgcagcctgctccctcctaccctggcctcaaggaaggtgggaaacatcttctgcatttcaaagtcctcactttgacttatttggccttcatcttggcatggaaggtggcaggcagaatggaaatactccccccaaacagaacagatattcttgcgtgtgtaagggcagaagggacaagctctctatcccatgagactaggggccggagcccacctgcctttccccacaacttttcctgctcaaacccactcctcttgacacactggaatctgtattatatatatttttaagaaaatacaatgatggttgtctggttttgttgtttttacaggtgttgtggaataaaaactgtaagaaaattaagtatttaaaatgttccaataaagtggggttttttgttattctaatatattattgtgtacctattgtaaatatgaaacactcctattttgcaagctgaggacacaatttgtactgttgttatatataaataaagtttactgaatt

SEQ ID NO: 20 - protein, 1909 aa, Homo Sapiens
MSTHRSRLLTAAPLSMEQRRPWPRALEVDSRSVVLLSVVWVLLAPPAAGMPQFSTFHSENRDWTFNHLTVHQGTGAVYVGAINRVYKLTGNLTIQVAHKTGPEEDNKSCYPPLIVQPCSEVLTLTNNVNKLLIIDYSENRLLACGSLYQGVCKLLRLDDLFILVEPSHKKEHYLSSVNKTGTMYGVIVRSEGEDGKLFIGTAVDGKQDYFPTLSSRKLPRDPESSAMLDYELHSDFVSSLIKIPSDTLALVSHFDIFYIYGFASGGFVYFLTVQPETPEGVAINSAGDLFYTSRIVRLCKDDPKFHSYVSLPFGCTRAGVEYRLLQAAYLAKPGDSLAQAFNITSQDDVLFAIFSKGQKQYHHPPDDSALCAFPIRAINLQIKERLQSCYQGEGNLELNWLLGKDVQCTKAPVPIDDNFCGLDINQPLGGSTPVEGLTLYTTSRDRMTSVASYVYNGYSVVFVGTKSGKLKKIRADGPPHGGVQYEMVSVLKDGSPILRDMAFSIDQRYLYVMSERQVTRVPVESCEQYTTCGECLSSGDPHCGWCALHNMCSRRDKCQQAWEPNRFAASISQCVSLAVHPSSISVSEHSRLLSLVVSDAPDLSAGIACAFGNLTEVEGQVSGSQVICISPGPKDVPVIPLDQDWFGLELQLRSKETGKIFVSTEFKFYNCSAHQLCLSCVNSAFRCHWCKYRNLCTHDPTTCSFQEGRINISEDCPQLVPTEEILIPVGEVKPITLKARNLPQPQSGQRGYECVLNIQGAIHRVPALRFNSSSVQCQNSSYQYDGMDISNLAVDFAVVWNGNFIIDNPQDLKVHLYKCAAQRESCGLCLKADRKFECGWCSGERRCTLHQHCTSPSSPWLDWSSHNVKCSNPQITEILTVSGPPEGGTRVTIHGVNLGLDFSEIAHHVQVAGVPCTPLPGEYIIAEQIVCEMGHALVGTTSGPVRLCIGECKPEFMTKSHQQYTFVNPSVLSLNPIRGPESGGTMVTITGHYLGAGSSVAVYLGNQTCEFYGRSMSEIVCVSPPSSNGLGPVPVSVSVDRAHVDSNLQFEYIDDPRVQRIEPEWSIASGHTPLTITGFNLDVIQEPRIRVKFNGKESVNVCKVVNTTTLTCLAPSLTTDYRPGLDTVERPDEFGFVFNNVQSLLIYNDTKFIYYPNPTFELLSPTGVLDQKPGSPIILKGKNLCPPASGGAKLNYTVLIGETPCAVTVSETQLLCEPPNLTGQHKVMVHVGGMVFSPGSVSVISDSLLTLPAIVSIAAGGSLLLIIVIIVLIAYKRKSRENDLTLKRLQMQMDNLESRVALECKEAFAELQTDINELTSDLDRSGIPYLDYRTYAMRVLFPGIEDHPVLRELEVQGNGQQHVEKALKLFAQLINNKVFLLTFIRTLELQRSFSMRDRGNVASLIMTGLQGRLEYATDVLKQLLSDLIDKNLENKNHPKLLLRRTESVAEKMLTNWFAFLLHKFLKECAGEPLFMLYCAIKQQMEKGPIDAITGEARYSLSEDKLIRQQIEYKTLILNCVNPDNENSPEIPVKVLNCDTITQVKEKILDAVYKNVPYSQRPRAVDMDLEWRQGRIARVVLQDEDITTKIEGDWKRLNTLMHYQVSDRSVVALVPKQTSSYNIPASASISRTSISRYDSSFRYTGSPDSLRSRAPMITPDLESGVKVWHLVKNHDHGDQKEGDRGSKMVSEIYLTRLLATKGTLQKFVDDLFETLFSTVHRGSALPLAIKYMFDFLDEQADRHSIHDTDVRHTWKSNCLPLRFWVNVIKNPQFVFDIHKGSITDACLSVVAQTFMDSCSTSEHRLGKDSPSNKLLYAKDIPSYKSWVERYYADIAKLPAISDQDMNAYLAEQSRLHAVEFNMLSALNEIYSYVSKYSEELIGALEQDEQARRQRLAYKVEQLINAMSIES

SEQ ID NO: 21 - DNA, 242496 bp, Mus Musculus
  misc_feature (14754)..(15356): n is a, c, g, or t
  misc_feature (38622)..(38645): n is a, c, g, or t
  misc_feature (56069)..(56088): n is a, c, g, or t
  misc_feature (58096)..(58534): n is a, c, g, or t
  misc_feature (90406)..(90425): n is a, c, g, or t
  misc_feature (102048)..(102605): n is a, c, g, or t
  misc_feature (114538)..(114557): n is a, c, g, or t
  misc_feature (123843)..(123862): n is a, c, g, or t
  misc_feature (141024)..(141045): n is a, c, g, or t
  misc_feature (143780)..(144694): n is a, c, g, or t
  misc_feature (161570)..(161589): n is a, c, g, or t
  misc_feature (175563)..(175582): n is a, c, g, or t
  misc_feature (177706)..(177725): n is a, c, g, or t
  misc_feature (221185)..(221560): n is a, c, g, or t
  misc_feature (238343)..(238362): n is a, c, g, or t
ggtggcccgaggcaccacgacccggaggagcaggttgaaaagatcggatggcagcaccacttctaccagcttcatcctcagacaggtaggaggttcgggcgcccggagcccgcacccagcgcggtccctcgcccccgagcgcgagtccggtctgcgccgctcggggctcggtccttgtccctctgcttcatgctgccctgtcctggggtccagccgcccctacctctgcttccaactccatccctctgctggtaccctggctacctagtgttggcatccctacatctctctgtcgctccgagaagttagtttgtattttgtgtacttgcgttggagaggaaaagggacattggccggggacactgaatttaagagctagaaagtattcctggcccaccttcgttgcacagagggaccttgagagacctgatttgatgcgctgtgagagtttgagggtttctccaatctttgtcctatttttgaatactttgcacatttttgagcgagttctctgagttctggccaaaagaaagacacttagaaaagtttagtctcatcttggcactgcttcatcgatttcgcgtaatcacggactgacagggacagcggtctagtgagacctaaataagacagcgcgggcgcagttcccagggtctggctgaacctcgcgctggctttcccgtgttttcctcgtggccagaggcaagtagttcgaaccgcaggtcgctagcaatgctcagttctctggtgtctgtcactttgaggaaggaaatcgaccctctgattttgcactacccagtgctgccaataaaacctccggagccgcaggatgccggagaaggaatgcacaagtggctcaccttgatctttctctggagtgtgtttttcccaggtgacttaggcagactttggtcactgccccaagacgcttttatcccaggttctgccctggactgctggagcgaccttgagaaatacttttctctctaggtcacccagaacgtggtgtcctgagattctaacttactatggcagccgcggtggttttttttttttttttttttttttgataattagtttaaacatattttcaaagtagaacatgatttagactcaaaattggactctgacagcgcttaaaaggtctataaagcatatttgggtaatatttctacgaacatttgtactttctgcagaaacagaaattatggctatcattctgtaactcagtgtggtgtgctccaggcatgaacagtatttaaacacatttgattctgcattcattttgaaagaacattgtaccctctttgcagagctagggttatttgtgaatttgattaggggaagccactgctcagcttaaaatattttttgagttatgcaaccctgagttctttatgtttattttgtagatgcttatttttggtagtgctttcttattgcagattcttggaactactaattatacagtagtgtgttctgtgagatttttgactaatacttttgaattcactgcactactttacactctgagcccaaacaaaacaatatcctttctgatattttccccaatttcctagtcattcaatgattgaaactacacacacacacacacaaaatgttgtagagtgggccgctgtgtgtaggcttaatggaaaaaaaatattgcaaaggtaattttaggagttacttgaacgagtatgaaggttttgagaataaatatagttcctaaatatttttgaaagtggacatactgatttcataaaatggtccaaattcaggaattaattgtaacaaacaatgttcttaattttggtacagaaacaatatctgttttgggggagaacttcatagcacagtatactcctgtacattatctaatttaaatagcatcatacagacctctttaaatgaattatttatatatacattaaagcataacaccctttaatagagctctttaaagggtgatggtaatttattaatatttaaatactttaaaaattaaaatttatcttaattgattaattgtgggtgtgtttgtggtggtcagagggcaacttacagggtcaattctctccttctaccttgtgagccgagggaactgagctcaagtggtcaattagctggtagctagcacagttgccatctctctggcttttaaattcttgatactaggagtgatggaatttcctggttttgtttcacatttattttgctttaactacaggagaaagtagagagaccaattggatcactcagttttccattgctgagataaaatgctgagaaaatcaacttaaaggagaaaagatttatttttgcttcatggcttctgagagttcagcctgtggtcacttgactgcagagaccagtcatagatggcgggggtgtggggtagggatgtgggggttggggtgtgctgacctcatggcagctgaagcagaaagacagttctaggaacagaaaccaaaggcctggagataaagtaagcccttcaagggcatgaccccaaagatctacttcctccagctaggccacaccccttataatttctaccaccttcaaaagccccaatcagccatgagttcatcaatggattaatccactaaccagattagagccctcatcatccaagctcttttgaacatgctgctctgggaaccaagccttcaacttatgaatcactgggggatcctttatgttcaaacaattgcatccataaaaataaagttgctcacttcttggtgctatcatttagtggaggaaaaccttttatggaaagtattccatgtgttgcattaacggtggaagactgctcaaaggtcagagggccagctgcatgtttaataatgagaatggttttagttcttggacctggtatatgttttgctgcctttgtgtatctatgcgcactgggaaactggtctcaaaacagggctgttgaggaagagaggttacctggtcctacacggctttgtcctggaatcctgacagggaatgaagggatgacagacagcgaggaaatgacagggacatgtgcagaaaagctaggattggatgatctctgctcaccttgatagagggcacctgttagactactcaaacaattgtgtttggcacaaggaggaggtcttctgaggtttctggaaggaagcagtctcaggctgtaaacaccaggaggagcaagttgtggttggtagtttctacatacatgggtcaattgcttctaaacactctgtcttggaccaaggggaggctttgccactcccctaagttccacccaggcaaggctttgtcatcccctcccccgcccacccccatctgctagattgctggctcctacagttcaggagagttgcgggtttggaatgaatccagagagccactaaatggcgtatttgaggaaatttgctactgaaaggggagcaaggtagactaggtgatccaaaaatggcttaaccatggtcttccaaagtgtacacagtctgatggcgtcttcttgccacacacaagatgatagagtctgatggcatcttcttgccatacacaagatgatagagtctgatggcgtcttcttgccagacacaagatgacagagtctgatggtgtcttcttgccacacacaagatgacagagtctgatggcatcttcttgccagacacaagatgaaatccaagagctggttgaagttaaaacagaatgacgccttacagtaaggacttccagtgattgctactctcatggggatggctttctcagtgtggacatgggatttttttttgccccaggaggtctctgataggctgtttatgggtagaacatgtatatgtggctcacatcctggagaagttagcatttgctttgcatccagctccgtgttagacactgtgagggaagaggaaagaggcttcgatcttgtactcaaaagattttatcgttgagttgtggagactgatagattacaaacagtccagggagggtaacagcaggcttgcacggcaaccggggactgtgtgcactgaggatcacagtgtattcgggatctcgaagcaatttagtcatgaatggcagagtattacgttagtcttcttcccacttgggtttgaaaagaaactctgatggagggttagttagctttctttttattgagtgacttctatgaatccctttatagggtccggcctctacccagtaacagtatctacccagctagaatctcttatgtctggattcagaactgaagtgtaccatcctcctgccacaggccctttgcacatgctgagcacctatgtggagtacattacctttctctttgcctattagctctttatatatccctcaagatccaagagttaagattttgtggagatttgttttttataatgcttctcactgccgcacaggctagcctcaaagttatgacaattctcctgcctcagcttaagaatttagtcttatttccttttttaaactccccgattaggtccgttttctaagaaggtgcttctagagccaaagtacctgtgctcatttttcagtcgcacctctccactgcagttcaagatggactaagatctctcttactgtctacccctgaccgagatctttgcttcttggcatcgagcctcattcatttgcagtttgggcccatttgaataaaggaagagaatgggtttggggataaatttttgttgcaaaaaagaaattgctccctaacaaacctaccccccaaattctgtagcttagaacaatttctttctgagcactgaccagacagtgctctgcttatgtgatgttacgtgggcacagggatggcggggaaggtccaaaatagccgcacacatgtgcttagcagttggtgcaggctactggcttcgagctctgctggggcttttggcagggtgcttggttttcctccatctgtggcgtgcatggttgtttggaccttttggtgatatggtggttgtagtctaagctggaccatcccagaaagcaaagacagcatctgcagatgccctagacttcagtttcaaactcaatacatcacttcttttgtattgcataaggtaaaataggcttaagagcctactccatttcaaggggagaaaagggaaagtatctctctctctctctctctctctctctctctctctctctgtgtgtgtgtgtgtgtgtgtgtgtgtgtgtgtgtgtgtgtgtgtgtgtgtgtgtagccagcagtgacccttaaatgctgttctccaggggctgactgacttgcattttgcaacagggtccctcaacaggacctgggacttacttgccaattaggctaggaaggctggccagcatcaggatccatccagttctgcatctccaagagagtatctaaaaaaccaaaccaaacaaaccaccaaacccctccaaactttaaaacaatatatatttagtatggtgtgctctcaggtgcacatgtcacagcacacatgcgaagttcagagagcaattggaaggaatcagtcctctcctgccatgtggggcccagagtttgaactcaggtcataacacttggcagtgattgcatttctcactgagccatctcactggctgagactatttactcgtgttttaaaatttgtatgaatgttagtgtgcctgcttgtctgcatgtacaccatgtgcatgcaaggtccttcagaggctagccggcatcagatccttgaggccggaatttcaggcaattgtgggtctcctgatttgggtgttgggaacccaaccttgaccccctgaaaaaggaggaagcggccttaatggtcaagccatctctccagcccctgagagtattttttaaagattttatttattatttattttatatgtaagtacactgtagctgtcttcagacacaccaggagagggagtcagatgtcattaaggatggttgtaagccaccatgtggttgctgggatttgaactcagaaccttcggaagagcagtcagtgctcttaactgctgagccatctctccagcccctgagagtatttttgatgtagtgaaaaggtcaatttccaggggtgtagaaagaaatgggtaaaacaaaattaaactcagcattaatattatattacgaattaaaattattcaatttatttggcaaaataagggataaatgttccatgagtccaaaaactatttgattaattttatataaaaaatattatttacgagtatgtccacacttgtgtgaatgtgcacgtgtgcctcggtggacttgtggaggtcaaaggacaacctagcggagctgtttttcttcttcttcttccttgatgtggtgtctggtgtttgaactctggcctttgggcttgcatggtaagccccttatctgctgagccacttcagtggtcctgtttgatgaattttaagcatgctgtcacttaaggatagagggagcttggtgtggtggtgatgtgtgcctgggatcctagctactgaagaggctgaagcaggcaagtctcttgagcctcagagtttggagccagcttggataacaaagtgagacttaaatctaagcaaaacaaaacaaaacaaaacaccaaaaatcatgacaaacaaaacagaaagaggctctgtggacctaatgaaaattatctactaaaccctcacaacaagattatattgcaccgagactctgaaagcgccctcgcgcacacacacacacacacacacacacacacacacacacacacacgttcagtaaataataaataattaaatagtgatatatttctagaatactatttagccattaagatgcagggatgacatgaaagtacattaaaacatttattcaacgtacaccgaagtgaaaaggtaagtcatagaataaaagaatggcgtcacatttagaaataagagcttgtggggcaggagacaggagctgcagctgtctgtggaaaccttgtggtttttttaaggtatgctaatcagatggtccttacaatgattcaatgaacccacattgtatttagagatcgaaaacatatgcagattctgagttgatactataataaaacaagttggcagagaaattctttgggttataatttgggtactggttacagacacatttctctgatgaaatgtgaattcgtcaacagaaggtatctgctttgtgcacagctctaagaataatcatatgcctagaggcatgtagatatgccaaatttatccataaactcggaatcacacagttttagaacaggaagagattgcagaagtaaaaaccttccagtttcttacttccagagaactagaacagaggcccggcatagggcggaaaggtcacgctgctagaggtggagctgagacagccttggcgctcttattttctccaccacacactctaacgctgggataaaaatggacaccgatttgtggattggttcatgaaagggcgcatggggtttgttcctctttaaacttgcactactcatttattacatgagtttatttaattattttacttttggaatagagaattgttgtgtagctccggctggtttggaatgcacacccttctgtctcagcctcctcagtgccgtaattataggtctggccctggttctagaagtgaccttactctgtgtaattgcttagaagaacaaagcattgttgttctggagggtccggagcctgggtttcttactaatcctatcatggatggtcctttttgcttgtgtgttcacagctcacaaaggattaattatttgtctgtttacttaactagtaagcagtcaaataatatattagccttattaccctatcaaaattacaggtattttcccttattctccacagacttgactataggaacatgtttaaacagataatgggagagatcagaaaccgggtccagaaattagctacagcatgaagccacctttgatagctttttaaaactacttttatttcattttattttatcagtataggcattttgtctatatgcatgcctgtgtaccacatgctccctggtacccaaggaggtcagaagagggcatcagatcccctggaacagaagttacagatggttgtgagctgccatgtgggtgctgggaatgaatccgggtcctctgcaagaatagttggtgctcatgacaattgagccatttcttcagctacgagccaccattactcaagaaagctgtggcggaaagagtcaggagctggacccagaggaatctaactggtagaagcaagcgccaaaggagatgctgcctctgtcagtgtagccacttggggtagagaaaaggaagagaaatatctactctctccctcttcccttcaggtgtccactggctgcttaggtggaatccagctggtctgggggcctgggatgcatcctataggcctgggccttggggtggggatgggaggagctgggaaccctttttatattttagctacagcacagcaggcagtaaagaagtattttcatcaacaaaggtagaaggtttcttttccttccttgcgctgtaagtaggtcttgcttcctaaatagtacagtccagttgcagggaagtttaagaaagcgttcacactccctttgagactgttctgtagggtgaggcttcgcaaactgcaatctaatcaaataaagcaagaaagagatcgacttttctcctggtaaaccctgctttgtctggaactgaatgcgtgaaatctaatgacggggcagctgatcagttagttatctattggtttattgatctctaagccccccacccccacccccaccctttctttctctatgttattaatacatgttccctaaattctatttctgcaggataaacgaccatgtgtctttgagtttagagcggtaagatttttattgacatgcagaataagctctgattcaagtgttaatcttcctaggaaattaaactgtatagaaagctaggctaaaaatgaagggttttgtgtctgtccccacctgatcagggctccaccagttgtcccctattgcactgtacctgggtgggttatccctcaggggataaaaacaagggctgagcagaggagaatgttgtctagtcaaatcattgggtagctagttgtagaagactctcgactcctgtctcttaactcgtgagatctgtctctgccatccagatctagcagagtctcctagctgtttggggcaacaggtcttccaaacataccttccttaaagtttgccctttctgggtttagttttcaaatctcagactcagaagcaggtgggcagcttgaggctcactcattatccctggaagctaggagatgcctcctggtactgggggatggggcatgcagcccacattccagttggtggtactctcccctctatgctttcaaggagttttgaatagtgtagcctctgttggcttgtcctttgccagagctttctgcccagcccaagtgggtgggctgagaaggggtatagacctcagaactaccagtcctctgagttggcccttcagtaggtgttcctggcctgtctgagactctggactcttcagactactgaacctggactgttatacaaatatgtccatcactatccatgaaaagacaaaactactcattcagattcttttttttttttttttttttccattttttattaggtatttagctcatttacatttccaatgctataccaaaagtcccccatacccacccacccccaatcccctacccacccactccccctttttggccctggcgttcccctgtactggggcatataaagtttgcgtgtccaatgggcctctctttccagtgatggccgactaggccatcttttgatacatatgcagctagagtcaagagctccggggtactggttagttcataatgttgttccgcctatagggttgcagatccctttagctccttggctactttctaatgctcttcattcttgaagactagaagttctcacaaaagctcatcaagagtccagtccacaaggctttaactatgagggtgagtcagggaatcttgcagggagataggatctgggttggcttcctgtccctgaaactaataccagagataatgaatttctaaggagagacaggtctggggggatgcatagctcagtggaccttccctagcatgtgcaaggtcctaggtttgatcctatgcatcaacaaaagagaaaagacttacgttggcctgtggtttcagaagttacagaccatggccacttggatctgttgctttgaggccaatggtgaagcgccatatcatggtgggaacctgtggtgtcaagataaactgcatgcccacaaccaagaagagaaaggaattctacgaacttctcataggttccaattaatgccaccctggggaccaagccctcaacacttgaaccttcaggggacacttatctaaaccttagcaaaccagctacaatatagcttcaataccatagcagaccagacaccagaattgccgaggcttgtatccataaaaaaaagctacaatatagattcaattttaagggaatgtttttattgcttttaagtaacaacaacaacaaactatggcatcctgtggcctgaatagaacacactatagcattatcaacgcctggcttgaacataaatagcacattggaattccttggttgtagttctcatttttattagagtaaacatggtcctctggaaactttcctatttctttaacgtaactcgattattgcacacataaatagaatggaagtaattacttgaatctgaagggatgacattcagtatttgtattggggttctgaaagcattaattaggtggaagctgtaaaaattgcttaacagctgtggaatcttgcagatcatcttactaatcatttggatgacaaatggtgtctcctttatgtcttactttatcttcttccctcttggtagatgtatcttccttctggctggcagtttaattgctgttgtggcatttgttttgagaggaaatattttctaaacataaacttgaaaagaatatgcatattttccccctgggctgtcagaatcaccagaagtggtgaacttacttagcacggatggtgcctagaaatgattcctttctcaaacttcttatggaattttaaaaagtcatttctttttgaatatacaaaaaactgtggaaatatacagtgccttgtgtacaataattcatcatcccaccatcatttcaaacggtctgctgctgttgtcaactcttcagatgcttattaaggttcaggaccaaacaagtgggtaaacgcctgtcctccttagtggatacggtcaatgcttttgtagagtgtgtgtgtgtgtgtgtgtgtgtgtgtgtgtgtgacaagcatggggaaggcaatctattctcatttttaccatcacaatcactcacacacatccttttccttacctctctataaccaaggcagcagctttgcaacattgtatattcatctgttctattttatgtaagtggaaccatacaataatgcgtgttcttttggaactgctcctaaggacttgtttccggctccagggctcagtggcagtgaaccttggtgtcagtgtgcggtgctgactgatcattggaaacggaattgcctttcagtgaaccttgtcaggttacatggtattgaatgggatggggcatccttgggcttatctggagctgggttctcaggtctcattgatgaagttttgttttgtttgtttgtttgtttgtttgtttgattgctttggcagaattattttatttcatggaactcagaccactaaccccagcttgttgtcaggaaacatttaaaaaattgtttttattttatgttgtgtgtgtgtgttttgcctgcatgtttgtctgtgtaccatgtgtgtgcagtgccgtggaggccagaaggtggcattcgtaccctgggattgggattgtaaagaggggccatacggctactgagatttgaacccaggtcctctggaagaacaggcagtgctcttaatcactgaggcatctctccagttccaggagagttatatataatagggtgttgtctacagaaggaaagaaaaatgtcagagataaaagttacgactatggttttcaataatttttaatattagaaataccttgagtacttgcaattcaaaattcttatattttatctacttttaaataataatgtatatttggtaattatgacatttcttcttttcttgaggaatacagtcagaaagaatgcagtgtgcctgagtccagatctaattgcaggatttatgggaattactgggtatacagaactgtactctctgtgtggcaggtgctgttcagtaatatttcagtacttccctgggggacagaagtcaattattgcacggttgtctgggagagaaacaggtcagctgcacacgggctttgctaatttcagagagcttgagggtgtttcagtttggggagaggcttgatttttttggtctttatgttctggtctgtgctagtgagtgctaagactttcatgtgtcatggtcatcatagccttcgatgtaatacaaagcttttcttttttatgtaaaatgaaaagcaaatcatacaatacctttatttaaatgtgtcaaatctgcattgtaagaatgatgtgaaccgtgggtgttatttgtggttttatttctatgttagtatatatgtttaataaatgtcatttccaagtattttgctgattgaagttctatataaaaaaaatagggtttttgtttgtttggtttggtttggtttggtttttcaagacagggtttctctgtgtagccctggttgtcctggaactatactctgtcaaccaggctggactgcaactaagattcacttgcctctccctcccgagtgctaggattaaaggcgtgcagcaccaccactcggctttccagagctttttaaagatagtgtcgtcagtgaaacttacacatgtccactttatgaatacacttagatgctacccccattacctaaacttcaaaacttatatcacttctggccctttctaaagtaacagcaaaaacaacaaaaccatccaaatcgtgtaccttggactcatgagtttggaattgtgcaccttggagtcacgagtttggaatcctgcaccttggagtcacagatcctggcactctgtaccacagcctgggctccaggtggagaagtggcagctgagaagaaatgggaagagctctggagggttggtgagatcggggaaggaatggctgctcaggtgtggtccctgcccccacagacatgttttcacactcccaactgcttgcctttcctccgatatatgaaatggggagaacttgaagatgctttggattaatgaaaaatctgtttaaaaaccactaagattgtaggagtcttaggaggctcttcttcatgaaacgtcacctgcctgacttattcttggcatgttcctctctctctctctctctctctctctctctctctctatatatatatatatatatatatatatatatatatatatatatatgtgtgtgtgtgtgtgtgtgtgtgtgtgtgtgtgtgtgtgtatgtgtgtatgtatatatatatatgtgtatgtatgtgtatgtatgtatttatgtatgtatgtatgtatattatctccaagtagcaaagtgggtagttgaaaaacccaggtccatgtgcctccgtccacttccaacgtgatgtcctccctactggcctgggccgctgccacttgctgggtacccattttcttcctgccacctcctctatcctaatactcctcctcttggagatatgtatctgtcagaactccctggaacctcctcctcctagaagcacgctcacacacatggctctccttccctggcatggccctggagctgtgctgcatattcacttagtaagtcttcctttgtgtaatggggaaagccggtgaccccaccagcctgtgtgtcttcacctccatcactgatgtgccatgtgggatgggaaaagaggagcggaggagaggagaagttgaagtgtgagcagcaacagtgtaccttagacttggcctcgttttctacatggagacacaggacctcagtgctttgcccttggtgttcctggctgataatctgctgcccagcaatggaggggtgcatcctgctacagctcgtcttcaccctgtgagaacaccactgctttcttctaggataccattctcagctctgtgctccttggcctctctggataagacttcctcatctctgggactcaccgtcccctgaatccttatgtggctcttatgccctgtatcgcccagatccttgggagggccagcttctgcagcattgcttgcatctctctgtaggggtctccctgggaatgagacattattctgctgctcagaactgaactcagaacctgattccaatagcaggtctcccacaggacgtcctgacctgctcactttgatacagacaaactctatcaccttttagctcggtggcagcctatatataataccctcatggtgggttagtagaagaggaaggataggagaaggcagaaagactagctaggaaactttgggatagggggtgttgggatgtctagggagaaagagtcaatggtaggagtgttctggttatgtttctttttttctttttttttcttttcttcttttttcttcttggtcttgttctcctcctcctctttcccttcctccttcttctctttcccttcctnnnnnnnnnnnnnnnnnnnnnnnnnnnnnnnnnnnnnnnnnnnnnnnnnnnnnnnnnnnnnnnnnnnnnnnnnnnnnnnnnnnnnnnnnnnnnnnnnnnnnnnnnnnnnnnnnnnnnnnnnnnnnnnnnnnnnnnnnnnnnnnnnnnnnnnnnnnnnnnnnnnnnnnnnnnnnnnnnnnnnnnnnnnnnnnnnnnnnnnnnnnnnnnnnnnnnnnnnnnnnnnnnnnnnnnnnnnnnnnnnnnnnnnnnnnnnnnnnnnnnnnnnnnnnnnnnnnnnnnnnnnnnnnnnnnnnnnnnnnnnnnnnnnnnnnnnnnnnnnnnnnnnnnnnnnnnnnnnnnnnnnnnnnnnnnnnnnnnnnnnnnnnnnnnnnnnnnnnnnnnnnnnnnnnnnnnnnnnnnnnnnnnnnnnnnnnnnnnnnnnnnnnnnnnnnnnnnnnnnnnnnnnnnnnnnnnnnnnnnnnnnnnnnnnnnnnnnnnnnnnnnnnnnnnnnnnnnnnnnnnnnnnnnnnnnnnnnnnnnnnnnnnnnnnnnnnnnnnnnnnnnnnnnnnnnnnnnnnnnnnnnnnnnnnnnnnnnnnnnnnnnnnnnnnnnnnnnnnnnnnnnttcttctcttcctcctcctcctccttctttttctcctcctcctccctcttcctcctcctcctcctttttctccttctcctcctccttcctcttcttcttcctcctcttcctcttcctcctcttttctgtttttggccaacttggcacctctgggaggagtgaatctcagtttaggaattgcttttatcagactagcctgtgggggcattttcttgattaatgcttgatgtgggaaggcccagaccactgtgagtgtagtaccatccctgagcaggtgatcttgggaggtataagaaagttagctgagccaggcagtggtggtgcacgcctttaatcccagcactcgggaggcagaggcaggcggatttctgagttcaagtccagtctggtctacagagtgagttccagcacagccagggctacacagagaaaccctgtctcaaaactaaatagatagatagatagatagatagatagatagatagatagatagatagataagtaaataaaagttagctgaatgtgagcctaggagcaagcaatactcagtgttattccatgggctccacttcagttcctgcctccaattcctgccctaatttccttcagtggtgtattgtaagccaaataaactttccaccctaagcctctggtcatggtgtttattacagcaacagaaagcaaactaggacaaggtgaggggtgtagctcaagaaggtagatgagaccaaacttagtccatttcaagtgttcttttctaactgtatctgttaggcatcttcctactgcagagaaaaagaaacagcaaagatcagctaatgcaaagcatagaattcttggttcacactgtgaaagagcagaactggatgtcatccttcagggtctctcttggttcatctgctgttatcttggcactacattcctcaatatacagttctgcgtgccagccaagtcctccatgtgtcccctgtcctggtggtaccatttatccacagtcccctcttgtagtagttcctgcagattaatcaaagagagggcgtttgtgtctgtttttaatggacatatttcctgagctccttggcgctcacactgaacacactttacttgaatgccattggcccgaatcaactctcaggagccacactgtaactgtgacatggccttcaggcagcaattggttactcctggtgatgtgactgaggctggtttagatctaactgagtatggggaggaccagctcatcagcatatgacagacttaggcaagagagggggagttctttgtgcatctagggtattggatgattaagggtcatttgaattgagcaagatataaataaatagtctcactcatttatagatagtttgatgttgttaagatatattcattcacatgggtgtgctaccaccattactgccttgatagtaaatccatttttaataggactttgtagataattgggggctgggatttctgttggaactgccagttttaatgaaagaaatgtgtgacgtgtccagtagctgactaagcagtgaacttctgggatcccacccaaagattggcactgcagtggctgcttgaatgaacatttcttgggcctctgtttttctctctgtagaatgagggtggagctttgactaggtaatttctaatgtccctaagtttccatcaaacctgattgctaaatgactttgtctgtggccacaaatggtgaccatctcattcattttggcaaaaaaaaaaaaaaaaaaaaaccaaccaaccaaaaaaccaaaccaaaccaaggaaacatgctattcaatagtgtagggtcagcaaagtttgattcgttttctctaaattatatgtgacatgggagttttcagaaacaaggctcagagactcatgaagaaccatttgtatgcttccgtttgatgaagaatgggcagctgtatggggctgcagctggaccaaaaggcacggtctgctgtgacagacttgatgggaaaccgagccaacgtgacgtgtgttctcctcggccgctgtgtgtagcatcctttctcctgggtttggggttgagcccgtctggaatgagggagagagcaacttcttctagagtttgcattagacgagagaagttttgaattctgtggcctaaggtgggaaagaggagttttggtgataaagtgagagtttgcttctgtggttttctagtctcccttagttcagagttctcagtacatgcaaatgtaaggccaacgccggcttttgtagagcgtctgagtcacttcactggcgagatggactgagaaccagggtttttcagtgtcttgagaaccttaagtgaggacatcctgttataatgtagcagagggatgctacagagagaatcataggcagaaagataatttgagatggaactggaatttataactttcaagcatatgcatgaaaggatgtgcaaagaatagaatgggctgtcaggatgaagcatttgtgagatgtgagacggttctcagagagatgcatcctggaagctattaagaggaaatctgctgagaagaagtgtggcttctgctattatgatgatcacagccccaggaagagcaagtaactaatggggctttaagtcggcaagaaagagtagcaagagctgccatattcgaacgtagctgaaggtgagaagaaccacaaggtggattcttatcatttggaaacactgcacagctttctgtatcaacttagcttcatgtcattcatttctcgggggtttgacgtttgcatgtatagctcagcaggattgcctgccttccagtaaatgaggcagggattctatttttaagtgacattaactatttaatgattagacgccagcaggtatttctggaatgacatcttgcattttcaaattgccttggtattttggatggaatgtttttgtcttcaaagtctcataggtattacgtttctggacagtttggtgtcatttgaacgaattaaccttcagagagtcgtttggtccggcctttgtaaggaagagactaacctcccagctctggcttgagaggatttagcaagaggaccagataaagatgcttcagtcagaagagaatctaccagaaccttgagtttgaactttcctgcccccaggattgtgagaaaaaaaattcctgttcaagccaccttttcagtgatgtttgttatagtgagtcactagctttgtaaggctaggaagctggcacacttttttttaatcctacttctcttccagtcaccagcacacattcctacaaaaatgtatttaatcctgcattattctggaagtgacctaaattatcttgtgtgtatcacacgtcaatgccataaactgaaggagaaaacagagataagatggtatgtcggacaaacattgtacggcaaccatatcttatttactggctggactctgacctttataggtcagttgtaagatttgaaatgtccaaaagtgaaaacataattgtttagaaaaaagtgtcagtatttcatattctgaaactagagagaactctgtgtaagatagtaaattatactctaagtagttaaatcctgtgatgaccccatactcctttcataaatccttccatgaagacaatagctcctagaatgctattatcaatcaaagcaactatgtaggagcacttctgcatgggtcacaacatgtatgattctcaaagtagccacctgttacaatcatcagataagtataaatatctttatagctggaccatatctcagcctaattaagtcagggtttctaggaatgagcatgggatatgaatatttttcaaaacttccaagttatgaatggagcttgctggtctgaggtaatccagggggaagacttctgagtggctctttccaatcaggacttgttagtcaggataggtgatgctgcaatcataagcgctttttccaaaaccacatcccaggtttagttttcacttgctctacctcctgggttagctgggggttagtgttttgttttctctccactagagtgactaccatttggaacatctctgttgggcagcagaggagagattgtgtgagatgaagatcatgtgctgactcttggcaaagtaccacttgaggagttgctgaatgcagcagcatgggaaccagaggagacactaatttgttttgtgtttcttcatttaacattctataggcaggtgggcagttaagggtggtggcacacagatccattacaaggcagtgatggttctgggacgtacttgtggatggttctgccattcttagcacctggagtctatttaggtccagtatggcagtgtgactattactgtctctatttccaaggtagctcaaaagggacaacaaggaataaaggactccatttttaaaagagaagatcagaagttaaatacacacacacacacacacacacacatatatatatatatatatatatatatatatacatgaaacgactgtatgtgctgtttgtttcacttcctccgttctgtcagtcctcactggaatcgtttccaaatatattgcttacaatccatctatatgaaccttgtcacgacactatcttgccttcaaagcaggctgagaaatgtggtttttaagtttccacgtgaaggctgaaaattgggacagatctatttcaggaagggaggagagaataaatgttaggtccagctaggcagcctctgcctcatcacagcagtgtggttttagcatagaaatcttcaaaggcaatcacagatgtcatccttgctaatcagtgtattttgaggtgtgttgatggggtggggggcttatgtggtttttttttaatgctgtctgcagcaattctagagacatcttcaaggaactcaagggctctgtgaaaatcacagatgtagatgaatggaggatttacatatgttgtagagaatcttccctaagtggtggttctcatagaactttgtgatcatggtggattgatgaaactgaatggtccttctgttccctatgttgcaaaaaaaaattcatctctcctgcatcttggtttttagcttgagcgactgttctctcttctaatattttcagtcttctctcattattccctaagtcaattctcctctgttttactgatgcccatatgaactcagagaggctctgacggcatgcacaagacctacagaggaccaagccataaggtggtcccaagtctgatagagggaagtggacactgggtctcacccctaaccaagaaactatttgcaattaatacctgctaacaatgagaaaagtcagttttcttcaatagagtctcactaggtatatcaaccacactccagggcaggcccccaggcccaagagtagttggccaatgcaatgcaaattccatgtttggtttcttggttttgttttgttttgttttgttttttagactttagttttgttttgccattttttgtcttattggtcttttgcctgtttgttttgtcggtttttgtttgttttgtaggagagagagagacagagagagaaagagggagagagagagagagagaataatgttgggggtgggaagggagaaggggaggatatgagaggagttgggagaagggaaacatgatcaaaatataatgtatgaaaaaatgtatattctataatgtccagtgggtttcagttgggggtaaatgtaatctaaatttcttgttgtggcctatgagatgctgtagtgattttattaatgccaaactcttactttatgtttgaagccagcttaaggcttcgtctccctcccttcccttgccttcttcataatcaacactaatcctgcctctgcattttttacatctctttccagaatgttctatgtagtgttttttaaatggcaagctcttcttcactcttcatacttccgcactaatttccccttcctagtgaatcctcctttgacagtctcgtctgaggctgacgctacctttgtgttacattccgttgctagagacaggactgcatgtgctgtgtacctcactttctcagttctgtcagtcctcattagaataaagtttccaaacgtgcagacaactggtatacccttcacgttcagactgacagacaaagcttctggaacttaagtgtttaataaatgttgatcagtaggtgcatggaatgacagaaacttttgatctgtagtagctggttaggagtctagatagcaggtcctgactctgtatttattgtcattaattattggaattacgctaagaatgctgtcatgttgataattttcttaaagaattggggtattgggcgatagatgcttcagtggctaatagcatctgttcttgcagaggacctgggttcagttttcagccccacatagtagctcacaaccattgataacttctgttctatggaatctgatgccttctgctgaactccataggcaccaggcattcccaaggcagatgtatgtatgtgcaggcaaagcacatatgtaataagtaaatcttaataattttaaaagtgaattcaagtgtcttaactgaaaaaaaaaaaggtttacaaatgatccaaaatatggaggtctttttgagaggaaattgggggcactaggaaacatgcaaataggtattcatggacctataatttcaatcctaaagaactaactgcaaagattttttgcatgggcaaacaattgaaagccatgtagacacatatccactgtattagcagccaccatagcacactagctttgtgcaatttccttcctagtatacttttcacagagatataacaaaaccccatgcattacggggcccaatgtcagagatattctcagtaacttggcaaaacttagatagtttctgggcttcccatcctggatcttcctggaaccatttctgcagttgcagagggtatcggaggagtcctttggctcagcacagacaccagcctggtctcctattcatcctgctgctgatgccttggtattgctcagaattaggtattgggcatcacagtccctgcagacccagatcctttttccaacactttaaaaaaaaaaaagatttatttattattatatctaagtacaccgtagctgtcttcagatgcaccagaggagggcgtcagatctcattatggatggttgtgagccacctctgattgctgggatttgaactcaggaccttcagaagagcagtcggtactcttaaccactgagccatctcttcagccctttccaatactttcttgaaaaaggtttgttagacgctggaatttgggcagaaggtaggggaaggctgtggcagagacctgtgtgcatggctcagcctagaccaatggaggttgtcagtcagccaggctagagtgaaaacctgggagagttaacagagggaggagggagaaacccctaatgcagggcttaaggtatctttttgcaaagtagattaggaacgaaattgcacaaaactggtggcctatggtggccactaaaacagtggacatgtgactacctgctttcatgctgtcatgagacagctcatttaggctcatttgtgcctcccccccccccaagctgtccccttttctgaagaactcctacgcatttcttcacaattgcataaatgtcacattttctacgcattcttctgcaacactcccggggcaaaattagtttcttccttccatagtacatgcagagtgcctctcacggtgttttgaaatatgtttacaggtctctcccattgacagtgagcccaacaaggacttgactgtgtcttaactttcatcgcaggcagcacagtggaatggttggtaggatcaactgaggaagcaggagaacagagtatgagttccggcggcttcactgattttattggagacaggctctctgtatgtggaccaggctggtcttgaactagccatcttcccgcctctcctcctaaactcacagtcatgtccccagccaggctgtatgatcttctctttgtgtgaccctgaccaagtaagaatagtcgggaggctcattttcctcccatagaaaacggggatgatgatacagctctcggaaaatgctgtgagaattttgacgagtaagattacgtatgcgtggcatgcgtaatattttatttaaaagcatgatccactgtacatattattacttttaggcaggggagggagccacagtgtgcatgtgaaagccaggaacagtgtctgggaactggttctctcctcttatattggggatcaaactcaggtcatcagactcacatgccaagcgcttacacctgctgagccatctcactgaacacttttcaaataggctgtgagccataatttatgtactgaaagttgaaggccagagtagtggttcttgatctgtgtgttgtaacccccttggggggggggtcacatatcagatgtcctgcatatcgctatttacattataactcatagctgtagcataactacagttataaagtaacaatgaaataatcttatggttgggggtcaccatgacatgaggttatattatattattatgacatgaggaaccatattaaaggctcacagcattaggagggttgagaaccactgccctagagggatgatggtggtgggaagggagctgttggtgggtctgaggtcagggtgctataataaagcaaggtagcaacaggaggggtgatgctggtaaggatggatggaggtgacagtttagtgacgggttactactatggtagtgatttggtgtaatggtagtgatggtaacttgctgctaattgatgtattaaggtggtggtaataatagtgtgtagtggtggcggtggtggtggcaatgttgtggtgatgatggtgttggtggtggtggcagtagtggtgttgtggtggttatggtggtggtagtggtaatagcagctagaggagatgacaatgatggtggacatggcaagggagccagtgctggtagaactttaatggtggtggtagtggtggttgtgttggcagcactgaagttttgtggaaaccagttagtttctggagctaaatccttcatctctgtaacagcccaccagctcttcttggattccaactcctaacagccttgcctttaccttgctgttctgagctcagctcctttcccataggctgtcttggggctcttcatccgattcttcatcctgcacactacctggacatcagctgtgtgtgcatcagtgtctgggatctttcatagtcacctatgctgcctgttccactctctccttcacactgtcttgcttttctgtctctagagattctttaaccaactagttttatgattcctttgtgaaataagacacaactggtaaaatattgcctcaagtctctcccagagagcatagttggcaatgcaaggtagattttctttttctgttgttgttttgttttatatttatttagcatgtgtatatgtgtgggatcaattatccctttccaacatgtgggttctgggaattgaactcaggtcatgagacttggcagcaagcaccctttacacgctgagccatctcactagccaggtgatatcagactgacaaatctgcccacatgatctcttctattgtcttaaaaacacttgtttaattcttttcacacacacaatttcattattgtacactgtgttccagtgtcttgtttgttcatttatatacttagcaattcatttgtttacagttacagaacaagtcctggcttgttcacaattcgtaatcattgcattcatagaatgtgggggtggtgtctgagttcccacataaatataatagagacacaattggcagcttacctcaggatgaaatgagctgagtgcagaagtcacttcaaaaaggacagcattccctggtacatggctggactcatgcagttgaggtggagagtgatatgggatacagtagactcttggatggcaaggagggtggcttttctgtttctgactcacctggtgccgagctttgcatcatgaggtcactgacagcagactctatgccttccctgcctgactctgccaaatgggcaaggttgagctgtatagatttcttcctcagatcattaatgtgtgatgtatgtttctctgatggcattccaccattcttttgagaaaactctgaaaatgacactaagttctggtctagtggaaagaacacagtattttcagcaaaacgctcagctttaaggtctagtgtagccatttatggtgagttttcctttccctctttgcataatggaatggttaactgctaggcagttctagactctaaccatgcctgacacatagtacacaaaagatagtagatgagtgaaccaaggccagtgagtcccatcagtgccctaaaaagtgaacactcatgtttctgctgtcttcattttgtccagagcctggggcctggggcctgattggtttgaacatatgttgaacaaataacttctagactagtccctctccctctccctctccctctccctctccctctccctctccctctctccttatctctctctttccttacctcccttccttcccctttccctccatgttttttctttgtgtgtgggagagtgtgcatatgtatgtgtgaaaggtgatatgcacgtgctatgtaaggaacatgtttcgtgttttccccagggcaaaggagagtgtctggggttctcttcagtcatcttctgccttatccctctcaggcagggtctctccctgaaccagaagtttgccctttctgcaaggctggcagccaacaaactccagtgatcctgctgtctttgcccagcttggtactgggattacaggcatgcatgggaccagactcacttttacctgagtgctggggtccagacggtgatcctcatgcttggacagcaagtgtgtctaactactgagctatctctctagccttctatccatccatctattcatccattcacccacccatccacccacccatccatctgtccgtccatctgtccatctgtctgtctgtctgtccatctgactatctatctgtctatcatctatctgtctaaaaacaaaagcaaacctgttttgcagagaactcaagactttctatatcccaggccaggaactccttatgattggaaaatgctaaatattataaggcactaaacttgctattgtattttcatactgttatttaaataggtgattttaatttttaatttttagatcactatagacatcttttttttggcaaaaacttataaatgtctgcaatgagttttaactgaaactgtccctaccgtgatataagcagcattaacattcaatatgccaaaatatatttcagcctttagcattctagtagaatttcctctaagttcatggttactatcagagtaatgattgccccaaataatccaagtggctgtttgctggatttcctgcagctcccccaccccgtgtctttgaggaacccttcttcatagtaaggtttttgaacagcagcaactttaaaaattttatatccttttcagcagatgggctgaccggcttacagtctccatggtaacaaggtttctgcactcgcccctccccctctttaaaaatagcctgaagtcacagaagggaactcagatattaatagcataagaaatttcaatgtgaacaacagttattaaatatgcagcctttgactacttgattcttgatccaaaatcacctgagagctccagcaaccgtgataaagctcacaggcacgagagccgtggcacttattttagtggcactgtggcagtcagtttgttgaaatgactggacgccctgtttattacagccatttgtgtaggtggggctaaagtcagaggacaacttgtggaactggttcagtctatcatgctggttttaggaactgaactcagatactcagatttggtggcaagcacctttccccactgagccatcttgctggcccaggacatcctgtttaaattagcctctacttcttcacttcccttttgccagtcaaacctggcaatgtactgtactttacttcagaatcaacagccagtagtgatgcattaatttgcgtctaagacaaactcagagctcttcttgtgcaattttctgtgttgttcatttttgtgttaactctgtgtgtgtgagtgttaaatataaaagttgcatgcatgaattcatgtgactacagctcattttgatttgactggtaatttacattagtgttttggactaacacacacaaaacattgaaaacccctcatcccaaaagaattataaataaacccagtgagtgcataaattgtgcttttaaaaaaattgttgcattttattgattaattgattgtatttgtgtatatgtgtgcacatgaatatgtatgtgtgtgtgcaccacagcctaaatatgtagatcagaggacaacttgtgggagttgattctcttcttctaccgtgtgggtcccagggatcaactcaggttatcagccttgggggcaagcacctttacccctgaagccgtctaagtggccctgtgagttgttctttaagtacactagcaaggcatggaaagacagccttgaagaggggatgtagcccaaagtggtgtacttatctagagacccagcttcccagaagagaagggagaaagccttcagtaagaacaatcctaaggtggaacaaggaagaaaaagagaaaggataggggttgtacactttgaaagaggtgccatgtccctgactctgcatgtttgggcctcattacaaaaaaaaaaaaaaaaaaaaaaaaatcaacccataccctaaactttcaagttttcgattgggatttgtgtgtgtagcagatatgtgtgcttgaatgtggaggctgaaggctgaagattccttggttgttttccaccttatttttttgagacaggctctcacattcgaccggtgtttactgatttagctaaattggacaatctgcaagtacaaggataacagacattgccactccctctggaagatcaactcatgacctacagggcaagcactctgtcaaataggctaccacatcaccagtagacttaaaatttttaaataaatataagcacgacatggttcatatttacaaagtactatgtgctatttgggggtctacccctttgtttttggttttagacccagagccccacgcatgcctgagaacacgcttagtgatgctactggttcactgggtctatttttacatggttatttttgtgaagtcatagcaaatgtttgcttctgcgctccaacattaacatacggtttttgtgtatgtgtgagtgcacgcatgctcatatttgtgggtgtgtggataatacttgcatgtagaaggcaccatctactttttcttttttctttttttttttttttttcttttttttctgagactgggtttctctgtgtagccctggctgtcctcagaaattcacctgcccctgccttccaagtgctgggatcaaaggtgtgcgccaccacacccggctcttttccttttgtttgagacggggtttgttttagttacttctgtgataaaataacatgatcaaggccacttacatatgaaagtgtttaattgtacctgtggctccagggtggcagggtgaaggcttcgtggaaggaacagttgagagctcgaatctccagccacaagcaggaggcagaaagcactaacttaaaatggtgtgatgcttttgaaagctcaaagtccatcactagtgacatatttcctccagcagggccgtgcctcctaatcttctcgaaatagccaccaactggggaccacgtatttaaatgcctaagccttatgggggacatctcatccaaatcaccacaggaccttttgtgcattattatggaactcgccagcaagccttgggtacacatgtctccacatacccagtgtagaattacaaacttgcaccacctcccttgcttgtgtgtgtgtgtgtgtagttttgttttttatttctttttaacatgggtcctgggtattgacctcaggtccttgtacttgtaaggcaaatatgctagtgactgagctacctcctcagccctttatagactcttttattttagcaaaagatatagattaaaggggaaatttaaaatatttattcattatgaagatgatgatgatgtgtatgtgtgtatgtgtgcacacaagccatcctgtgcatgtagaggacagaggacaactttgtacagctgttctttctttccacttatgtgggtttcaggtactgaattcaggtcaccaggaatgtgtggcaagtgtctgtacctgaccaccatctcaccagtgctggagaacttttttttttttgaaagtaaaagaaatgaattgagcatgcctgctgtggtatttaaatagactgggtccccgtagactccaacgtttgactgtttggcggtagggagtggccctattaggatgtgtggccttgttggaagatgtgcttccctgtggaggcagttttggggtctcatatgtggtcaagctacacccagtgtgacacacagtcttctgctgctgcctgtgtatctgtaaattaaatgattattatgttctgtgtatatcaatcaatcttgggaattaaaacaggggtaaccatcccctaagtggctagttttcaaaataactgtgcagaaaccttctaatatttcaaaacttaggtcttagctgggcagactctcagctagaccatctaagttaacctggtcatctagccccatcaagtcacgtgactagctataccttccaggctcagagtcacatctctttcctctgatgtctcctagcgaaaaggccttccttcttcttccaagagttcctttctccctcccaggaagtcccaccttccacttcctgcccacctaagtggccattcaatttttattaacaccaatagagaatgccttaggtaggtgaggaaggacagagacccaatttcacactgcataccccaacacagatcaaaatgtagaactctcagctccttctccagcaccatgtctgcctgcacactaataacagacttaacttctggacctctaagccagtcccaattaagtattgtcctttataagagttgctgtggtcatggtgtctctttatagcagtagaaccctaagacacctggtgtgtctagttcagtggataagggaacttgctaggcaagcatgaggacttgaatttgaattcccagctcctgtttaaaaagatgagcacgggcctgtaagcccaccactaggagagtggagtcaggagagtcaccaggacttgctggataccagcctcatttctggtcactgacagactatgtctcagagtaattggtgcagagtgaggacacccaacagcatcctgtggtctgggcaagcatgagcgagtgtactcccctacgcacatgtgtcccccactaaaaacaccccaagcgtctcctgcctccccatttccactgtcacaccactgtacttgcttgctctgttctcagctgactggttgagctgcgaagaggtgtggagggtgtgtgtgaaagcaccatttgcttctacaaggggggtgttatttgcgtgctgctggtgtgatctagtgggaggccggctggggccaggcttctgctgatgcttcctgtatcactgctgcttccctggaaggaccactttcctaggaggctcttgacccatattcaagcaccccaccccactcccacacacaaactattgggcttggtttaacctagtttcctctaaaagtccatgtgcagttagtttgtttgggaagtgattcctgggagcatgactatgaagtctaaaaagccaatactaaaatatattgatgacttggccagtctgggatcaactagtaatggatgacactgtgcttttcctggggagccttatgaaactcataccaggcctcttaccttagaaacaaaggcagattatacctccaaatgccacaaataaaccaaaagaactatctagatcaataggtaagaggaaagggggtcatggatctgttgacttctgtaccatgccattgatcaaagcagtcctccagtctctcagacccaagctggatggatgtgagtgctaagcatcctcttgtcagagaagcccatggccagaaacacaaaggttcacacaccagtgaagagccagtgggagcccgttggaaatggtctgttgcagcatggctgaagagctggaaactggaggatgtgacatgatggtatgagacactaatacttctctcatggtcacttatcacggcttcagtgaaaggagaactctttctatctttccaggaagtggtccatggtctcatagaatagccctcaccaggcacctcaccatcctgacccttctaatctcttcctcagttttggtacctccacctcattagcatcatgcccctatcctgtctttaaagcttcttggagctggtccagctgggtgtccagaccagcttcaggagtccttgccatggctttagatggagagctaagagacattgtctttgtgtgtaaaagtgtctattttgtgccagacacctgacatacaacaagtttaagacagcttgcctagccacatcccaaagtttgactaagctgaacctcttagggtcaataaatttcttgccagccactatggataagaattaaccctttccctgaagagctgctttgtgggaccattaaaggcaacctagaataggaaacaaaacacccatggaaggagttacagagacaaaatttggaagtgtgacgaaaggatggaccaactagtgattgccatatccagagatccatcccataatcagcttccaaacgctgacaccattgcatacactagcaagattttgctgaaaggacccagatatagctgtctcttgtgagactatgccagggcctagcaaacacagaagtggatgctcacagtcagctattgaatggaccacagggcccccaatggaggaactagagaaagcacccaaggaactaaagggaactgcaactctataggtggaacaataatatgaactaagcagtaccccggagctcttgtctctagctgcatatgtatcaaaagatggtctagtcggccatcactgcaaagagaggcccattggacttgcaaactttatatgccccagtacaggggaatgccagggccaaaaagggggagtggggggggtatgggggacttttggtatagcattggaaatgtaaatgagctaaatacctaataaaaaatggaaaaaaaaaaaaggcaacctggtttctggttgagctaagtttaaaaccccagacatctcgcagataactcagcaagacacggtaggcgttttgccacgctcctagacaccgggctcctgacatgaggccgcagttctctgctccataggtctgtggccaccagtcaggtaagggcaacgccccaagcccctccataggtagaggatgtgaccacatagcttcaagacagatctccattttaacgaggcacctaaaggcttgaagggcttagccaattaagctctcctttccagacactcctccctgcaaaaggtatttaaaggcctgccctgagaaagtggggtacggtttttactcatcacaactctcagtcatgacaataaatgccttcaagtcatggactgtctctgttcatcaggacccgccgtggggagcaatggagcaggccttcgtctaaagagccagccactaatctctagcaaaaggcctctcagcgctcccagccacagtctccaccaagccaagcaggactctatcatccttgagtgacccaaccagaactcaccactccccactttcccctttggccccaggctagatccagccttgggggcggggtggggcactcagttctcagctcttctgctgcatccattgggcatcttgggatacccaagagtctgagaacctgatgttctcggcctccatgcaggttctgggatccccaggccgcctccaggagtccccagggacctcagactgaattccccatccccagagcagggtcctgcggcttctcatagctcatgttgtgggcctgggctatatatagtggatggctgagcatgtcaagggaagtaagccagtaaatgccattctcctatggtctctgtttcggttcctgccttgacttccttcagtgattggctataatctgggcacggtgacatgaaataaatccttctcccgaaggttgcttttggtcatggtgtttatcacagcaactgaaagcaaactaggacaatgtgtttgtgtgtgcgcgcgagtgcgcgcacgcgtgtgtgtggtggaggtatgttcacacaagtgcaggagctgtggaggttggaagcatgggatctccctagagatggagtttcaggtgaccacgagctcgctgatgcaagtattggaaatagaacttgagtccttcgcaagagcagtatgtgttttcaatcacagagccatctctctggtccaaagatcaagtttcttgatttaatagtgggtatgtggtttgctgatgaattgtctgttggaattcttgtacaggaatagacaggaatgcttggactttgtgactatctccatagaacttcttggactttctgatctagttccttggagcgcagataaacgtatttttagttatgtatttatttgagacagactcttgctatgccttcaagccttgccctgtacccctgatcctcttgcctctaactccaggggttacaagcacgtgacatcacatctagcttgcctccgtgtgtttcataccattgctgaagagctcaaagctgagcgctagtatttttttctctctgtaaggaacatttcttttgagaattctgtacatacaacgcattttgatcacactcatcctcagccctccctctagctctcccccagtcctctgccacactcctctcccaagtatatgttcttcctctttcttttaaaaagatctctaggagtccaattcatgctccaaaagtacatgtggatgtgagggcgtccactggggaatggataatctaccaatggctacccccaaagaaaagtgactctcccaccccctgcagccatcaactgtcaatagcttctcaactagagagagggcctcaggagcctctccccgctccatagtggaattttgactggcttgatcttgttcaggtcttgcacaggtagtcaaagctgctctgagttcatgaggcccacggttgtactgtgtccagaagatagcgtttcacagaagtgtacctcactgcttctctctcccctgttctctctctctctctctctctctctctctctcctctctctctcctctctcccctgccctctctcttccgctctctttttcctttctttcttcctctctttccttctttcttttcttttctttcttttcttctcttctctctctctgtctctctctgtctgtctctgtctctgtctctgtctctgtctctgtctctctctctctctctctctcttcttcctttctttcctctctatacactgttccctaagcctcagggaaagaggttactatatgatgttccatttgggactgggtactcatacccacttgttctcagaatgtggagcagttacaagtctctgcacggactgctgcccactgccttaagaagcttctgtgaccgaggttgagagcatcatggatctatgagcattaatagtcaaagagagcttgacagcatgaccatttggcaaaatgactacggtaggttactgcctagagtctatgaccttgggccagttttacagtactgtgctttcgttttgatgcatatttgttatttgagatatatgtacgcatactagcttaaagtatgttttaaaaatcctgttatgtatacaaaaataaaattaaaaaaaaaaagtagaacaacagatttaagtgttttcttctgtattcctatggatttccttgcacatggagagccaccatgttggaggtacttgacttagctctcagccattacattcgtggcttccatagttgtgaatcttgagatgtttgggtcaggtcagtgcagtggtagacatagcatacctgtaccagcctctgtgtgtggctgtcctttggaggcatctcccaagcacttcagagcccagtttcagcaggctgccacccagagagtgtgcactgtcttttctgctgaaactctaacgattcttgaacagagcactgtttgcagacaggtcttgtttggctcgtgattaaggacaaaaaaaaattgtttttgaatgactgccaagatttgattgttgggggctttgcacagcaatctgaattttcgacttttctagaagacttgtgaagacttagaaaactggctcttcgttctagggagtcagctgtctgtggggtcagcactgcttcctccagagaggagtctgctctcttggtcctcataactcatccactgatggcaggcgcccagcatagtgctacctgtgtgtctcgcgtggaatttaggtagctctcagttatgtaagatctccaagtggccaatgtcaaccaatgttctgagattaaatagcgtgcaagaggacacattcaagcctcacggtgtgaggcctgcttcttcctttgtttattgactcagctctccaggcccttcatcaaacgccctgaaattcacctgtgcagtgtgatctgctgtttagccctggaatgagagccccgggcttcagattctgcctggccatttcctaactgtggggcctcaggtctatttaagtaactaagccctgcttcagtttcttcactggcaaaatggagatcatactaagtgaatgcctgtaaaataagagactaatgctagtgatattaccaggcacatagtaagctgcctgttatcattaacagttcctctttttttttttttttttgagacagggttcctggctgtcctggaactcactctgtagaccaggctggcctcgcctctcaagtgctgggattaaaggcatgagccaccactacctggcaacaattcctcttactggacattaaacattgattatgaggtttgcaatcatgaagacaatatctaaactcttaagaaccttcagcatggtgcacttaagatttagctaatttcaggggtgtgcataagtcccgggggagtccagtatggctaaaggtgagtgcagtctcttctcccttgggggtcaggggatcctttaatgtggagaagcccagggaactgcctctgccctggcctacctcccccaccttgacccctcagctgatctctgcatagctgactggccctgtcctaaggcactttggggtacttgtccccagactggtatgctaattctggagaagtgttagcttcctgtctaaatctgctcgcagctcacacctcacatctcctgttctgtttccttcctaatttgtcatcatgtaggtctgtgcagaaccgcacttggaggaagttccttctcctcccctgtgtcctcagccaaatgtgtgcagtctgtccttggccaaggcacagcctcttctgggccctgttgtgtgaggcaaagagcagctcctgggaggggcagctccgtgcttcctgagagcctcttccactctctggggatgggaggctgatgtctcgcgcccactctgctcagcagaggtcctgctctgggaagcttggaagcttgctcagatggggtgcacttcagatgtgtctggagggacatggatgtccattgcaagtgctgttcttggtggcatgttacgtttactttctgcgtggatgtgtgtttgtgtgtagttctgctcacacacatatatgcgtgatcacacagcactttctctttctcagtatttgctgaaaatgaactgcttgggctatcagaagtattcctaattggaatttttatggtcattctttattctgttctttgagacaaccagccacctctggagccatttgtgtttctctgtaggtgtaggaagctagaaaccagagctacacgatttgtcctgaaaagagacttgggcaagggactcaggcagctcccgtaagatgtaccaaccaagctccccctgcttcttgtggttattaggagactcaaggaaacttctaagtttatttgctctaaagttgttcttaaaggtaaactgtggtaggtatgaggcatttttttcactatgtaatacctatatagtaaatattcaattagtaatttttttcctaaattgagacatgaattaactctttgctctttttaaaaacagttttaaatgttgctgactaaaaagcaatatatattcactcaaaacatctgagatgctatgaattattaatatgttggtatatattcacattttctgagcatatgcacacaaagaggcgagcacattttatagcaatttacatatcacttgctctttccatacggctgcttatgtgcatcttcttaggcagccgctgttagtccagatgtgtagatgaatcgtggtttgctagactgactcctggtgccggttttcaattttctgcttgtacaaatgatgctgatgcttcatttttgctgtaaaaacttcccagaatccacattcctgagcaattgtgttctagtctgagactgtaacctaccctcacccctcacctcaatgcttttctcttgagcctattcaaagtagttacatgaaatgtctgaggaccttattataatacaatttccttgtggtccagcacaatgatattttgtgaattaataatgcatcaataattcatgtcaaatgtgaaccttttagtgtaataatggtatgtaatgagcattcagcaaacatttatccaacccttactgcttaatcagctccgtactgttttttaaggctgtagagatgaataaagttcaggaatttttcccaacacacctcgtttagtgcatcaacagatgcagaaacaaataattttaaatcattatggcctgtttcagtatattggatgtgtcctccagaaaaaaaaaaaatcaaaaaacaaaagcaaagcaacaacaacaaaaagccaaaccaaaccagaccagacaggctccctttcagctgcctgccccagtggaaaagagggagaatgactcttggaccttccttcatgggtcaggccagttgagaatctctgttgaagtttgtgtgtatgtgtctgtgtgtgtcacacacacacacacacannnnnnnnnnnnnnnnnnnnnnnncacacacacacacacagagagagagagagagagagagagagagagagagagagagagtgcttcccagcacagatgtcagtggaagtcatagggcgcattcaggctcttgtttgtggcagtaagagtaaccacaaaatacagctaaggatgaaagctcagtgaaggcagagtgaaggtgtcaatatttacaagaatgagcatcgctctctagtcttcctctaggacagtgcccaatgctgtggccctttagtacataaagttcctcttgttctgacccccaaccattaaatcattctgttgctacttcatagctgtaatctggctaccgtaatgaatccgaatgtgaatatctgtattttccaagggccaccttgtgagaaggttgtttgacctccaggttgagaactctcagagcttcagaaacctcgggtgagcgttggactttctaccaggctggaattgggatgcaagccaagggtaactgaagcatcaaggacagcatgagtcctttgggttagactcacaatagaactagggatggggtttcagtcaggtgtctggtaattgcctggggaagctgggaaggctgggttagggacgtggcgtctgggtcttctgctctctggagcagaaaatacatccttggagcatgacccttttccgtagtccttgtttttgctaccagaaaaatttgatgaggcttgagtgtgtgacccactggacgcgactgcagcaggccagctgcagagatacctggagcatgaaatttctggatcatcttgtatctatggacaggtgagccaggcgatgaaggggtaggttgtgtgtcaggacgtgatcgtgtggtgagtcaggtctgtgaagctgtggaaacacttaaggtgtgtgtgcctctcacttgcgtgttccttgacagctctttgtcacactccccagaccccgagttcccagtcctctgtagtcaaggtcagagaatatcaagggtgcggtttcttcttagctatcttctctcagaaccagagggggagagcaccttctttcctagacttcttcagagttatttcaaagattgattaataatcctgacagcctccggaagctggagaaaacacttaggcttaggagcctaatagccaaagtggtaatcagagatcagcgggactcagtgggaagtatgtgaaaggccttttgtcttttaggcctgtgggctgtgtctccatagtgaaagagtctggccaggggaggccctgctgtgtcaggagaaagaaatggtggctggcaaaaaggcctagagaaggttatttaaaagaatctgggcttaagatatgacaccaacgcacaagtaaccaaagaaaatataagtaatttagattttatcgaaattaaaaagttgggttggagtgtagctcaggcataaccatacatgcctaccagtcacaaggccttgggtactaaccccagcctaaaatgaataaataaatgaataaatgaataaataaataaataaacaaatgttaaaaaacctttgtgtttcaaaaggacagtaacatgagagaggaggaggctggagagatagatggcttatcagttaagagtactggctggtcttccagaggacctgggttccgggacttctgatatacccttacacagacattcatgcaggcaaaacaccaacgaacatattctacattcaggtacaagagaaatgaaaggatatgtctgcagtctatatgagtcttgtattctcacagcaactattgatgccaacttgtggcgagggtccttacccactgagttgtcatgccgacgatccacctctactcttataaaggtgctaggttcatcaccttacactgtggagtgagctttcaacacggggactctgggacatctctaattgttcagtctttcgaaaaggttctgtgctctaaatatcccaaaattgattttgataatggcgccacaagtttgcagatatgctaaaagcatcgaactgtttattttaagtgattagattgaatggtatggggatgattgtatctgaataaagccgccaccctccccggagatggatgtaaaaagtcacaaagaaaccagggctgcagggatggggatggaagaggaccttgcttggcaggtaaagctcctccaagtcaccagcttctcattaggttattctagaagggcttttgttttgtagaggtgagtgtgtctacagttaaccttccttctcctactagacctggccccattaagaaagcagtgaatattagcggatgctaacggtgtgaacttcattaacatcccatctgcctgtcactttccgggaggctcttcttatgtgatgactgattagttttgttcatgttggtttgtgctgatgtggctgtttggaggaaatctgtcagtgatgctttcagctccaggctcccagagagccctccatcccaggaggaggtgttgtctctgacagtgttaaagcttctgaagggccaggggagggtgaggttggagggtaccaaacgagagggaactggtcatctctcaggcagctaggagactcaacgcagcatgttactttgaaaaggcacttgtttcgcacaaatgggacagaacctgtagccttcgttcagtcggccataccctgaagttttgccaccctggctaggatgtgtctgcagagctcaggtagtggttctgccggtccagtcaagacacttggatgccagtctttgcacaggggcctagtgttaattactaacagatcaccggattggagcttcctcctcttagtacatgatgctctgttgtcaagccatcagagtcataatgagggtcccctaggtggaatatggaatagaatgtgttctctttctgtgtgtgtgtgtgtgtgtgtgtgtgtgtatgtgtgtgtgtgtggtgtgtgtgtgtgtgtgtgtgtgtgtgtggtgtgtgtgtgtgtgtatctcctaaagcagggtcttagattactgctgagtaagtcttctatctacacacagaagcttcagaacacaccttgttttgttttccatagatttcagcaagaagttcgacctataaggcacaaatctcccatttgtgccaagcaagagcctttccaaagtaacaaaggaagactgtcctgctgacctacttccttcctgtgatgaagatggtggcagagggagagagagagagagagagagagagagagagagagagagaagaggagaggtaggaaaggaaggaagagggaaaaggtgagcaagagacagcaagggagagggtcacagaattatcatagcaagcaaagagaaatgaagggctccgagcagccactgggagctgagagaaagactgaacatggctgtgtggtaagccagacgggtgaacggggtaaagagcagttgttactgggtcctggtccataaacctaccatcttgttttctctgtacccgaaaggaattagagaacagagattggtaaagtaaaattggttgatttatagattggccaactagcggagaactggctgttctggagaatttcctaggccaggaaaagggtgggggagggaggaggcagccgctgaggtgcgctgaggtgtggtcctgctgctgtcctgagttgggagatgggtgtttcaggatctaagtggaagctgttaattttttgactggggtcttgatcgccacctactggtggctcgtcctggcttgcctgcaggtcctctggagaagtgtcagctcccagctggagagttcagctgggttctcatggtggtgcatgagggatggagtgactctacctacttatcgtcatctggagtggtcttgcttcccagaggacttgtagcagtatctggagacatctttgattgtcacagcagaggtgttactgagtccacagctagctttcccacgacagagagctcagccagcccagagatgtcagcctgagaggtagaagtcctgcaccacctgaatatcttttaaactcaacacctgcagcccagacagccataaaaccctttctccttattgggtgggagcacccagagacggtttggttccgttttgctcaggcaataggcctgagctggtaagccaggttttccgagttaattagcttaattttaaaaaagctaaggttgaatgcaaagccgacagaatcttcttgttttccacgtttgcagctctgcagacatatcttacccactcctttaagaggcctctctgcctaggagaacgggctaacacggcagaaatcagggcctccagtggcctacacccggcattgaacgggtctaaccccatgggtctcaggagaaataaacgagaaaggaaacgagtgtgagattgaaaggtaagaggcagatttttaagagggcaacttagatttgtcctatttgcaggagtcaagttgaagccagccacagctgtagggaagaaattgtggagagcgattatcatcttagtgattgttctgtgaaattgctccaggccagaggcacttgctgtaacagttttataatttaacctctctttaccctgctgactgatggagcctgccagtttctagcacgccacctttctccagggggcagttctggctgctgtttctgtctttgctcacgtctgagaaaatgggtgctgtgtgttctgggacattctagcttcccctgaatggagctccccttgtcgtcttagaaatgcagttccataaccaggaaccgggaaaaacagcctctgctttctccctactgcgtgtggccttttctagtccattaaaaaagtgaactcaagctcatcctatttatttatgacgtgatttctctttctatgctataatcgcagttgttattgaagaaagtgtttcgatactctcattggttatttcagtgaccgaagatcaagacctgttgatttctaatctgccctcaatacagttatttttaaaaacatggtctcgagaactagatagccctagctgttctcaaacttactacatagaccaggctagctccaaacttacagagatcttcctgtctctgcctccccactgctgagattaaaggtaagggccacctcatctggcgacagtccatctaccagaactttatatcctctgtatttgaaagtctgttccaaagctggggaacagtctggttccgttgttctttacgtgtgcgttttaactctaaagtgaatcttggagtgtctgatgaatccctgcttgttaagttttctgaattgagagcagtgcaaaggagaggaatgggaagtcaccagtcagtccgcaggcttctttgggccttgccttgaagggaatcgtggtagaatatatgtaacattgccttggccattttaaccattgtcaagtacggttcaccaagaacatgtgccaatattgtacagtcatcctcatccctttatctccagaactctggagatagatgctgcccagacatgacccttcatgctctccttctctccgcagaccccagtgacatctgttttactttctgtgaattcaactgctctagggaccgcccaggagtatagttgtaacggtgtttgtattctattttttttttttttttccgagacatggtttctctgtatagccccggctgtcctgaaactcactttgtagaccaggctggccttgaactcagaaatccgccggcctctgcctcccaagtgttgggatcaaaggcgtgagccaccacgcccagcttcagtgtttgtattcttatgcctggattttttcacttagtgcaatggcctcacagtttctcagtgctggagaatgcagcagaatttcttttctttgaaaggctgaatagtattccatccccatttctgtgcctttttcgcttgcctgtggacatctggattctctctagtttggctgatctgaacagtgatgccatgaacattcagctatttccaattcttacccgagcatattaaaaacctcatctatctgtgagtgagctgaaaaaaagctagcaaacgctagcaaatgctaccccatccccaggcttgcacgcataccaacttctgtatttagtttcatgcactgggaccgcttcctttggcttcagctcttccttctgatccacccaccccaggttatcccacctctccatgactatatcttttccctgtcttctttgatgtgacacaatcttagctatcacacatggttcaaaggcagacatttttgcctagttctgtagtgctggggaccaacctaggcatgctaggcagtgctgtaccactgggctacattgccagcccactatattttgatgtcagcatttattatgattttttcatataattataattttaattaactacattgaatcaactatccaagaaaagaggaagacgttttaatttagcaatttaaaagctgaggtggtgatggtgcacacctttaatcccagcatttaggaggcaaaggcaggcagatctctgagttctggtctagcctggtctacagagtgagctccaggacagccagggctaatcagaaaaaccagttttgaaaaacccaaactaatacccaaccaaagacagaaaaacaaaaactgaaaaactcccacaatttaatactcgaaaagtagatatagtgtgtttgaaaaatggaagacaagggaattatagatatttttacaaacctgtaaaaatattcctagtatatatgtatgcatgtatgtatacatgtatatatctctaacctgtgcatgcatccttttctgttcttgcattgcggtattaggaacccagagcctcattcctgccaggcaagagctctgccgttcagctatactcaaactcatgctcttttaattgtgattataaacattaaaaaaaaaaaaaaccacaacatttttatccagaaggggaaatcttgatcttttcctaatgattactatcagcagatggccacacagatgaacagtaaatattgtagtagtgaattcagctgatgattcaggtcagtgggacagccagtctccctccttggacctcagtctagctccaaacaccacatggctgggtctgtaggaccccttcagaggaacaaggagcctggatctctattgaagctataacctggagaagcagagaattagtgctcagagaaacccaaccccactccaaacaaaaccattgggagggagagcattaagagggagagcattgggagggagagcattgggagggagagcattgggagggagagcattgggagggagagcattgggagggagagcattgggagggagagcactgggaaggagagcattgggagggagagcactgggagggagagcattgggagggagagcactgggagggagagcattgggagggagagcactgggagggagcagagttgaaaggcaatgaaatggaaagctcttgggccacaagagaaaggaaagggattcttcctgagaccttgctggtgaccccagaggagttagggtgacccaaattggcatcgtggtcttctctccattctaatggccagttgcttggcaccttatgagggcttgtctcttatggtcatcaccaggacatgagatcaaccttgtctataaaacaagagtctgctctgcttagcccttcatctgggctaaggcctggccaggagagatcggttgattgaccagactgtatagtttatactcctgtgcaggccttcagttagtattttttccaggtacttcccagaggtcaggcatcatttctagtgctgggaaagtggatgagaagacaactgactctaaggaagcgccattgaaggtgtagaactcagcatatagacagaccacctgccaaaatgcaaatgactacctactccatcaaattccttagtgtctgtaaagcctctaaatgtctattaaccttgatacttctgtatcccacttccggctagctgttcttgttaactcaggtttgtcaacccagaacatggttttggtgcttaaaagctcacctcgagaaaggctcagggctacactagaatcctgaacacccagtgtagtcaccagccagctaataaagactttctattggcttaaacccatgtccggccattcttctctggtgataccccacaaccggtcctcttggcttaatgctccgatggaatcaataagggattcctaatgatgctttggccttctgtcagctgaatatgccatccagtgttgctggagaaaatattatcttttaatcccttgtaaagtcacacccaaagctgtttctagacccaatctttttcatggttactgagtagggaaggttatttccagccagggctgatgtcaggtttttgctttctacagtctccatgccccagcctctcctcaaacccgggccgttcctggtcgtgattttagtagacttcctcttagtcaacagcactgttcagtcagcccaggcctggccagttgccacctgctttctgtgttccttcctactcctgtatcattattttttttaaaaactggatttaatcactcgtgggaaatataaggatttccttttattttattttagaaatgttttctttgagtattctgtttatgtggaaaaaaaaaaaccaaaacactacaacttaaaaatgtatgctttattaaacagattcttaggcgtaaaatatccagctctacccatcagcataagaattcccacggacagttccaaaagtgaaatatgaacaccttgggactagataaagggaactgaaaatctcatccgtctttcttagtgcctggaaccgaatgctcagtgcttttgggtagttgaaatccttgctgcttttactctgtactctattctggctcctcacaaaagctcccaagaagctacaacactacaagtaacaactgaccagttacaagttgcaactgttacttcatcctttcagctctgcttagacggtacaagggttgggtcataacacatgctgcttatgtggatattgtcttgctggaaaattattaggagagagccaatttgtttcataggaagcatccgccagggttaattaccataatttggtactggcagcacgtatgtttgcgtgtgaacagaggatcacatttctagggaaggccttaatgattcattaatcttgaaaatttcattttatatgtaattacctgaagggagtaagagaggcttggttgatgtcatatctttggtgtagttgttttgttgttgttgtttgtttttttttttaataagacagggtttctctgtgtaactgtggctgtcctgaacttgctctgtaaaccaaggtgaccaggtcggtctcaaactcacaaagatgtgcttgtctctgcctcctgagtgctgggattaaaggtgtgtctcccactgcctcttttggtgtggttcttatctgagtagtgtacatgatagttattcctacatgtaaagattgtagatgttatggagttgcttacataggagtcaaacagcagcagagaatcagtagttcttgagatagcaaatgtataaaatttaaacttttaagatactatatgggatgtcttggtgtttttgatgcttaaaaaaaaatccaactaatttattcagaataacctgaaaatgaagttcctcatttagctggagtgaaatctgggagactggtaaaaactttgtagacgtagaatgtggagtcagaattcatgctctttaacactgagcacatgttaattgtgctaagtacagttaaggggttttaatctgtgcaaacagaattttgacctaagtgtgcaaaaggaacatcttgttataaatggcatcattcacattgccgtctttatctcagattctttggaaaaataaatgttatctgtctgtgctcgggtgcattgctgacgccgtctttgactccctttctgatggcttgtgtggcttctgcttgtgcacaggctcttgaggtgttcctgcaatcccacgtgctgtgttgatccggaccccaatacccacccagctatgctcaccgccatgctgttagtcagcttcctgatactatttttaaaaaactgcacttgagataattaacttccaacgagaaaggatgattttggttcacagttttggaagttctagtctgtgataattggccctactgcctgggggtttcagtaacacagttcatcgaggtagaagcctgtggtgctactgtcctgcctgaacccagagccaaagaaaaggaagaaggagtcagaattctagtgatctcaagacctcttactagatctcacctctggggtttaccacctcccagtaatgctatactgaagacaaagccttcacagcaggggccttgggcaagtcacaggtctagacaggagcatgctcagagcgatcaaccaggaatctttattaagagaacttttaagactgggcctagtggaactcaccttttatcccagcagtcaggaggctgaggcaggaggattgccagttcaagcacagtctgggatgaagggtctggttgggagcgagtgtgggtggtgtgtgtgtgtgtgtgtgtgtgtgtgtgtgtgtgtgtggtcttcttcaagaatcttagtgttatagctcctttaggtgaaggcctcctccaacgatctttatgaaccagctctctgagacattcttagcctgttcgtatttctttatttggagtgaatttgagcgcatgtgctttattgaggtgatccaaggattgtataattttaaggacaggcatgagaatatttggtgtggcaaggtcattgactgaaggctaaggctactgagatgcctcattagcacgaagaggccttccaggtgctgggcacgtgactgcctgactgcctgtgatcacctaggtgggggtcatagttgcatgccccagaacaaacatgaagacagggaaggagttagctctactcctgccgatcgtaaatctctgagatttctgaggtttgaccatgttccactttagcagtcccacacccactcttgtggcacagtctacgtgccctacagtccttcaaagatgaagacaagaggatcataaaagagtgcttactattacatagagaatgatatagtgggaagtaagtaatgatataataagtaagaaagagctattgtgagaacaagaacatcctagcattccatgtgtattttggcaagtgaacagagcagaagtatttagtataacctataaccctagcactcagcaaactgaagaagaaagactattgagtttgaggctagcctaggctacataacaatacaattttctaaagcaaacataaaacaaaaacaaaaattgcaaaggttctctgcaaagagtcagtgcagcaagggccataataaaatttgtagatatcagaaagctatgatttgttattattgttattatttaaatacaaggaaatttgggaaaactctgctagttaaggttgatgtccactatgactagatagcctctgagttcagcgaaatatgaaagacccccttcattagcagggcttctccatttctgatcttgtctggggaattctaacccccatacatattcctctacctgaggaatatcaagtagccttagtttgattataggatcaatgtcctttctcctgataaacctgttcagccagcacctaagatcccctgaaatgcttcctgatgctaacgaggcattccaggtactctaagcccctagccaatgacctttgcccatcctggatgttcctaccatcagccctccaaaactttataagccttcaatcaccctaagtaaagctgatctgtctcttgactgctggccccagtgtggttccttcaccaaacatggcttccgactccttccaacccccacggcttgatgcctctgctctctttgcccttgtggattgtattggccaatgatctactcggatggagacccacaggaaatgaatgtcagcttgtagagtactcatatacacaaggaatgacctggattctggactggctattctctttctcagatgcccatccagagccaggtcattgagccagcagacttagggaactgtggggaagtcttgttctctttggtggagacatccagtcctgggaagggagtttcttttctgctcagagaatgccctaggttggagtcatctctctgagctcactgttgtttacgccactaatgtgggtgactttagccaagcctaccaccagcccagtgctcccatctagggacaccaatctcttaccctctcctggatcattccgtgtgtgtctttgaaagtgaccacattgatagtgcagcctgcttctattgcctggatcttttgagaagagagattcaaaaaggaatgagagctggcctctgtgtctaatgagctgttaaagaggtgccaggccacaggaaaatggccagctggataaggacgagcctttcttgggtccctccagctgatccttcacacctccccacttccattcctgagtcacctaggcatttatcagctctgctgagcacactcattatctgcaatcaaactgcactgccgcttctgggcagccgtcactcaaactggggtttgccattaacagaagctaaaagcagggctctacggtctcaattaggctccttaggcctaaggcaagctgtggagcttgggaagggtctggagggctgtttgactgttctccgcagtgtgtgcacactcttggtatgagaattagcaagccgcagcatcaccagcagagagccccttgccttacaaggctttttgttctatgttccgaccacagtgtccagtatcctggaagctttgaagaatttgggaactctgccacaagtaggatttataaaaaactaccaaccctcccacctcccaccccaaaacacaatatgatagctagatcacagtgggttccaagcacttgttactttaggggttctcgcctcctcccccctttcctggcccagtgtaaaggctgaacagattccctgggtgctgcattttgtcccaacctctttgggaggtcactgccttttgcctccagctgttgaagcctggttctgtgtctcccacaggctggggctccgccagcttcctgctggagcattcagcagacagcttcaggaatgcagccctggtgccgtgtgactgcagggtgactaccctggctgactttcagctaactgggagagagaatccctggggggaagcacctctggccttctggctttaagggagccatggatgcaatggcctctctctccctcgagtccttaggaagagtgacatcctaaacactgagtcctccctgagaggggatcagtacctctcatcaaattgtgcatgaagatcactggagaaggccgctgtctttggttgtttgtgggatgctttaaaatgtgttaggatgtacttcttggctttttgtttttgtttttctttgcttcaaaattccccaggtcaggatggaagatgaattgaaggaactaagacataagtggaggcagtccctgccaggacccataaatgtgttcctagcagggaccccaatcaggatatcctctcactccccgcccctctctctcccccagtgtgtgtgtgtgtgtgtgtgtgtctgtgtttaattcagtgagtaaatcaataggaagcagaatgcctcataagcacattcttgaattatgcagaaaagaaggagccttgttgtatcgttaggtataataagtgttactgtaacatccaccattaagcactcttcaaggaagcaaacagagtgtcattcttctttcccaaacggagactctcatgtgattgagaaagtagctgaggaggcagtaaacacttgggagccttattacccaactacacacacacagaaagacacacacacaccatcaccatcatcatcgtcatcatcaccatcatcatcaccaccatcagtggccagcacactaagtatgcaatatggtgtcagtgtgccatcttgtggcactgtttgtcataaatgttttggagatgcaaacacccaactaaggattctggtctggtggctctgccctcccaactctgtctgagaatttccatgtgctaggcagtcactttaccccagaactacaacccacccctctcttagctctttggagacaagagctcactatgttgcttaggctggccttgaacttaccatcttcttgctacctcctctagggcatccttgccttttttttttttttttttttttttgtttttttgagacagggtttctctgtgtagccctggctgtcctggaactcactctgtagaccaggctggccttgaactcagaaatccgcctgcctctgcctcccgagtgctgggattaaaggcctgcgccaccacgcctggctcatccttgcctttttgaagctgtagttcatggtagattctttatagctctaaggtggtctgtccagtgcacgctagcgtgtattttgcactgagttctaccctgacagcaccattgctcagactggaaactttgcttctgcaggtccatttctgcattgaaacccggccttcattaaatttaatatttcattttcctgtcagtattcataatggaagccaggcttcttgcatgtggtaggctacatccccagtcccttacaaacattttattgtggtcaaaagcatgtgacacagatgttaccagcttaatcactgcaggtgtgtggcatggctgtgttaaccccatgtgcgtggctgtgcaacacatctctgtgccttttccttttaataaaactgaaactctgtatctactgaatgcttcttctcttccttcccccagttcttgtccaccattgttcagtgttctaccatctaggaatttggctgtagcagttaggatttatctctgtagccgaactctggcctagcagagacctgggcttggtctccagtatgggggtggggacctggggctatggggagaagaggttggctgatttaggaaccttgtttaagtgactcatgtagcatatgtcatctttgtggctgacttacttcacttagcgttatatactcaagattgcatctgcatgtcgcagaattcccttcctttaaagggttgaataatattccactgtatgtgtaggttttactttttgctttgtagatggacatttaggtgcgttcacctcgtggccactgtgagtattgctggaacaggcacggggagctcatcttcctcgcctttattcctattggtataatttagctcaaacagctaagtgatttagtgtagtcttttaaaaatagctacttggcaggattaacaattcatttgtctaactagttgattcttggtgtgtgaatgtgtgccaacccttgccatggtcacatgtagagtgatttccagaagaagagaagatttccagttctcttcttcaagcgtgtgggacctgtggcttgaactaaggctgccaggcttggtggtgagtgactctactcactgagtaactttgccagctgttaatttatccttgttttaaattcgtcaatggttgggggaagaagcttgagagattttctgttgattggtttcaggcagtcttgtggctcatctaaaaggttagtactaatccattttaggcacatgtcaatatacttagagcattttaaacattcctgtctgggactaaggagaaaggaatgtgttatttaatgaagcacttgcctctcacgaggcatttgaatattgtttacaatatggtggcattgatgctagacctttctctctcactgggtgttggactttgcgctacacagaagttcggattttcaaggccattggattaccaaatgagctaggtctagaaattggaaatgtgttcagttaatcaaggggccactccaacccacaactgcccatacttttgtgtcagtcttcccagggctcgcagctacccttgagactctcaaaactgacccgtgggctgggaagatggctccacagttaagagcattggctgctctttggacgaacaggagttcatttctgggagaccgggagactaacacaatagccccccaccacttaagactccaggtcccggggacctaacacattcttctgccctctgtggggacctgcacacatgcacacacacatacagacacaacagggtttattttttgttttgttttgttttcctttttaatttagaatcttgttaacaattcattatatcatcagtagaaaacaaaacaaacaaaacaaagcagccattttagaagatgatgtgctaaatgcccaataccagggaaaacaggtcccctcactggactctactggcaaacccagatatgccctgaactctacagtctccatcttagatggatgatgaagcattcaagtaaacggtgaggagtcccaggtgtgagtttctgagaggtaccacctcagaggagactccggagcagccacggccctccagttcatccagtattgcgtggccttgggcttaaccagccattttcttctgaggagctctgatgatgtgtcagcctcatgacttagtggttataaaacatctcccatattaacaagcacttgagccacatgaacacgattctcatcgcttctccaacttcttgtacttggcttccagtttttttgaataagcatcgagcttgtaggctgcctgctccagagctgccacctgctcctcaatcatgttgatctggtccagatatggctgtagttcagcatatttctggtttaagtccttcaggtttctgctgatgttgatagcaatatctttcatttcaaggtacttcaagcttgttagcttattcatattttccaggagtttgtagtcttcactggtggctgtcagttccccagtcaaatatgtggccattttggagaacatgtccctgcagagctcattgatgtcagcttcggcaggctcctttgcttcctcggctgtctccaccgcagcatcatctcgaggtggctgctcctcccgtcgcgtcgccgggacgccctccgcagccgccgccatgcccgacccaaggctcaacagggtttatttcatctacttgtttgttttgtttgagacaggctctcacctgcccccaggggtggcctctgactgtcaccactccccttgcttcagccccctgtgagctgaggttgtaggtgtcagccattttatttgaccaggacagccgggtttacagtaaagatgggaagccagagtgaggttagtttgtctttctcaaggactcctcaattcctctgcagcatggcctcgccccttcactgccatcaccctcactggagacccagtgatgccctcttggagacaggaagtactgtgctaattgctgtcttctggacctgcgnnnnnnnnnnnnnnnnnnnnctcagctgcccactgtttgtaagacctactttgtaagatatgacttctattgggattttaatttgaaacaaagtttaaacggctcatcccggtgcattctgatagtttaacagccactgttggaaggtaaataacaaggggacttcaccctgactccgtcctgctttgaagcctgcctgacaggctttacctggaagagagcttgcatttttctggatatgtgtgtctcccttttctccctccctctcttcttccatctctctgtccccctctttatcccttcctccgcaacataagaaacagttgaactttattccctgtgtgttagagataaggacttaaaaatagcatgtggctcagacaggatgagaagaaaacagctgttcgttgcccttgtccagctgtggtctaagtctcttaagaagcaagggatgggtctgttgtctgaagatggtgggactgaataaatcctgcccagggaaacttgaaacatcaaggaattgggtgggaggcatccttgcaagggggtaaaagttcacctgtctctgtctcactcatctcatggcccccggctccttagaacaagagcttaatgttctgtcaagattactgagcgcttcctaagatgaggcaaatatcccccaacccaaatttggctccttcaccctttgagaaaatgcctgccttctgtgcaggagaatttataaaaagatgatcagcctgggtgcctgcttcctttttggaaatggtatttatccagatcacagtgaatctgcctcttgcctcccatggcagccgttggtagagtagaaccttcacatgctatgaaggtgctgaagactggaggagacctcaggagacctatctgcaaggttgccaagcaactgaggctgcggatgggaggagaagctgctgtcctagcttcctggtcaagcctcaatgcccaccctcttatgtatggtcatgtttacagggtgactagtccacaatgccaaagggatgatttaaccagaatgtttagttttcattggtaaatatgttctgttctgcaaaagtagttttcagcatcctcttccatccaaatccttcctcacttgaccccatctttctgacttcacacagagcaaaccaggtaccacatcaaggctttcactttgtctgttcctccaacttggtgtggtcttcacctggctgtgtccttactcaggccaccgcagaagttccacctctgctgggggtgggggggggacttcttatatcaaccaggtataagcaattcagtttgctatcttcaatttcagaaaggacctcagctgttccttacaagtagaggttgtagtgagtctctgggtggactacggccacacagctcaagtgtctgatttcctgccccttgtttgcagtgctgagcatggagcccagggtctcaggcatggtactcttccctaaacccttctgtctcttcctcatcagtgttgggagactgaacggcggcaatgccaacagatttcctttccctcaattttgcttatgaatgtgagcaatgctcagagagcagaaggggagctgtgttctgtgttggagtctgaagttgtctcctactccaagtgtctcatctcttgatggaaggccatgcctctatcctagtcaggctcactgtaaagccacccccttcttgtaactatcccctttccttgtctcctctctctgtgttatagctcccctctgagcctctgcattctgcactgcttcctcaggttacagaaactcttcctatattgttgtaaaagtgcatttattagcacctcgtaccctgtcagacaaccatggattaaagctggacttcaacaacaacagaaacaccagaaagcctacactttgatggaactctctacttaatgatctctgggtcagggaagaaataaagaaagaaatgacagactttctagaattccatgaaaaatgaaggcacaacaatacccaaacttccgggacacaatggaagcannnnnnnnnnnnnnnnnnnnnnnnnnnnnnnnnnnnnnnnnnnnnnnnnnnnnnnnnnnnnnnnnnnnnnnnnnnnnnnnnnnnnnnnnnnnnnnnnnnnnnnnnnnnnnnnnnnnnnnnnnnnnnnnnnnnnnnnnnnnnnnnnnnnnnnnnnnnnnnnnnnnnnnnnnnnnnnnnnnnnnnnnnnnnnnnnnnnnnnnnnnnnnnnnnnnnnnnnnnnnnnnnnnnnnnnnnnnnnnnnnnnnnnnnnnnnnnnnnnnnnnnnnnnnnnnnnnnnnnnnnnnnnnnnnnnnnnnnnnnnnnnnnnnnnnnnnnnnnnnnnnnnnnnnnnnnnnnnnnnnnnnnnnnnnnnnnnnnnnnnnnnnnnnnnnnnnnnnnnnnnnnnnnnnnnnnnnnnnnnnnnnnnnnnnnnnnnnnnnnnnnnnnnnnnnnnnnnnnntctgttcctctctcttgtctctgccctcacctgatcctgacccccccccccattcccctttcccatccagttccctccctccacctgcctcttatgactattttattccccctttaagtaggattcaagcttcctcacttgggcctttcttcttgtttagcttctttggttctgtggagtgtagcatgggtatcctgtactttatggctcatatccacttataagtgagtacatgccatgcatgtccttttgggtctgtgggctagctcactcagaatgatattcccaagatctatccatttgcctgcaaaattcatgatgtctttgtttttaatagctgaatagtattccattgtgtagatgtaccacattttcattatccattcttcagttgagcaaggtgggacagatctaggaggaattgggggagaagaaaacatgattaaaatatatagtatgagattatttttaattaaaaaaaaatatatatatatataaagtaagcctaccttcaaagttttaaacacagattttagtctagctatggtaatcaatacctataatcccagaatctgtgaggctgagggaggagaattatgcatttgaaggtcaccctatgctatatgtcaaagctcttgtctcaaaaacaaacaaacatacataagtaaaccagcactggattttataacctttttggtttttcaacttgaaaatttttaatacagtagaaatgtttcttaaattgtgtatgcttttcagtatctcaacctagcattccctaccctcaaaacataaaataaaaagtatgtttctacctggacaagtttctctttggggctcgttatgaacccaagcagtcatcaaatatgacaagtccaagggaacttataagaaccagttttggggtcgagttaaaaattgtaatattatacttagtgactatttttcacctgaaaatagtttaggggtacaatctatatcacagagaataccccctctttaaacagatgatcgttgcagaatgtctttttaatatctccccatatcactagaacattgtcactcataacagcagtgatatttggacagtttggtaagtgtactcagtcagtctttaaaaaaaattttttttttttggatcaaaactccttttagtatttatcaggagtgatatggacttacgtagctgtaaccttggactgtagaacttactgagccattgatcatgctaagaccagagaaagagcattgggagaaagatggacagagaagagcagcacccaagcaggagacataattttttacttgagcagttcacatccttcctgtacatgtgggaagggtttgagaccatttaaagattaaatgaataaacataaatgaatctgttgtacttaatttacttgctgttaatggagctcaggtagcatgtctgggcaatcctgattcctcacggagcagccagcgcccggattatctggacagctgacactgcgggactggttccagacaagaagagttgccaaatccctccaagatgtctaagctgatttagttcgcaccaaggtttattggacaagattccaggatgacagaaaaagctggaccagtcctatcaagctgtgtacctgggacttagagaaattggatagtgcattagaactgaatgtagtgtttgtgaatacttcctgctggctgtgtagcttggttaagctttgctgcccaagaagggagacaataatgaatcccctccaatgttgtgagagcaaatgaactaatacatgtaaattagccagatcagtggttttttttttttttttttttttttttggcctctctgttagccttctggcagaaattaaaaacctctttttagaattaataaattcatttaccaagttacagttccattttgcctgtgctggcctcaaactctttacacgactgaggttgaccttgaacttcaggtcttcttacttccattaaaaactattgaggtattaaaattatggcgtactgagggggggggggtgtgttcctgtagctatccagacaccttcctgacccgtgtgatacggcttaagcagaaccatggtcgtgaatctccatggttacctcacatccctctttggcaaggttaggtccactctctacttgcctgggtattggagggaccatgcttggccctctcagagcgcataaagccacaaaaatgaaaagcttgtgtccctgactttgcagagacacactacagagcttacagccttctaggcagctgcagtccagtagaggggacagacttccctttatggaagagacagctcttttcaaattatggatggttatcgaagcatccttattttcttgcctaattctctattagctccaagtctggaggatggactctcgttatccccactgactttcttctcatttcccagaggcctcggggggtcttaggacaagtatccagggaggtgagaaaccccaaaggatgaggacacttgagatctgctaagtcccagaccacggaacaaagcacagggctctctgacctgccttcctctctcaggctgggtcgttggaggaggccactaggggtttcagttcaggtagcatggcacctgtgagcagcaggagatctgagaaggactctccacctgctgtgtgctccttcactctcagagtttctggttcccagaatgttctcttaccctgccccttgcaatttaatcatgatttatcctcagaataatatcctgtccttaccttcttctccttgtcataccatacacctgtaacgtgccacgattttgtgacttgtgatgtgccctgtgtagtatgaccaaatatccccagggcttaggggtttctcaggacatgggacaggagatgctaaatcccagacagttctgggtgccccagggtggattgtcatcccacctcagtcccttttctctccagaagaaagtttctcaataacctgccatttctttatcagtaggacatcctgtcagtactatgcaatcctcttatttactctgagcacctttctcctagactgctgacatcagcctcccctgccagagtccaaggctggacaatgactgaacagccagcttttctactgtttcacacagcgtcagttccagaaggcagtggagctcgtagctgacctcagaagccaacgcttcttgaactcagtgattctttctctgaaatttccccttatcgcatgccagtcatgagaatctcatactgccacaacaaaatactatagtcagggcaacttatatactctcagaggcctttatatactctcagagtctaaggaatccaacatcaaagtgccggtggattcagtgcccaatgaaggtatgctttctggttgacaagtgtaactgactctcaggatgtcctcatttgttggaaagggcagaggtcctactcaggcttcttttaaatacactgatcctatcacaaagaatatccccacccatgacctgatcaccttcaaaaggcttgacttctgaataccattatcttgggagttaaaaaaattactacacgtattcactgtccatagaattgtgttttgatctgaaccccaccccctctctccctttccctttccctttccctttccctttccctttccctttccctttccctttccctttccctcccctcccctccccttctcttctctctctccttccttctctctctccccttccttctctctttccttctctctctttctttctctctctcttcctttcttctttttgcgagacaagagtttcactgtgtagctgtggctatcctgaaactacaggactcttgtagaccaggctggccttgaatttagagagatcttcctgcctctgcctcccaagcgcagggtagtgtgtgtcactaccacctgacttggatctaaatttctaagattcataaacatttagactacagcaagcctcttagtggtttgtaggctgatggcttcttgtttgtcttcaccttgtagagatggaaaattctagtctgtttctctccttgggagagtactaatcctaaaaggcccctcctttctgctgccattttaatccagatatgttttagatgtttcacttccaagtacattgcattggaggctagggccttgcaataatacttttgtaataatatttttgtttcgtcctgacaaacaattcctgacagaaaccactttatggaagaaagggtaattgtggctcatggtttccaaagatttcagtccatcatggcagggaaggcatacagcactcacgatggtggaatcatcaaggagtgacttgttcacatggcaacagataggaggtagaaaccaagctagatgcggttgtaactttcctttcttttttctttctttcttttttggtttttcaagacagggtttctctgaagagccctggctgtcctggaactcactttgtagaccaggctggcctcgaactcagaaatctacttgcctctgcctcctgggtgctgggattaaaggcgtgcaccaccacgcccggctagcttgtagctttctttcttttcttactttttttaaagttaggtatttatttcagttacatttccaatgctatcccaaaagtcccccacatgctcccccacccactcccccaacctcccactcccacttcttggccctggtgttcccctgtactgagtcatataaagtttgcaggaccaatgggcctctttttccactgatggccaactaggccatcttctgatatatatgcagctagagacacgagctctggggggcaggggggggtactggttagttcatattgttgtttcacctatagggttgcagatccctttagctccttggttactttctctagctcctccattgggggcactgtgatccatccaatagctgactgtgagcatccacttctgtgtttgctaggcccctggttgtagctttctaagagctgttcccagagacccagttctgcctcttgggccccacctcctaaagctccgcagcttttaaagtagtgccacaagctggggctctggcattcaatgatgtgtctatagtacagactctatgctgatatttcagattcatcctaacagtctgcagcatgttgatgtggagtgaggtggcacaagccattgtcagtaacgttttgttttttttgttttttgtttttttgttttccttttccttttggtctacttgtctggataggcaatcccaggctacttggatttttttcctccttcaaatttatatagctgcaacatcttctatgaagtttcctgaccaaatcatccctttcattttctttcactagcatttatatacaacaggaagagctgggatatttttaggtatttgtcacttttctgatggcacccacttgggtaaactcctgcatctaaacactaaatgcaaagctccattcttcatttccttgagaaactgcaaaccccagggcaaagtgtttacccagtttgtgacacaaaattgtgaccaaatcattgctctctggtctcagtcttggtccagggtcaaagagaacaaatgaggtagctctcagtttctttctcaggaaagccaacacaaatgacatggtcacacatattgcatctttctgataaaatgatggcacaattatctgaaaaccaagtgtatattaattcttattacataagccattctgttcttagtatttcgccgtggttaagtatttaaaggtatagttgtagagggatctgtctataggctacagtagaaccagttacttgaaggacctcgcttgtctgtagtctaaaagggaggcattgctgggtgtcaggggaatgcactcaggctcctgcagaacaaagaaaaatctgggtcacagtaatgtctggcttctgttccacatgcatgtttaaatggttttaattttgcagtacagccattcccagttgtgcccttcgctggtgtagagattacagcaatggagaggaaatcggtaaggctatggtgcagtgtccatcagcccaaccccttgaactcccagttctaaatggttgcttccagctgggagggcactgttggatataagctgctgctcactggttcgtttctcccaccatcgttgttttaggtcttggctcaggtagcttttgtctcatgttgttttgtggaaatggagagtcaatttctcacctaaaatttaattctgatgtcagtactgatggggtccacatgcccaaagcattataaagatctttatctggggaggtggttagggctgggggtggcaggctccagcactgaaatattgctggatcaggcaggagcaactggctttgactttttatggcagttattggtctgaccaggtcttatttttagtttctccaggtgagggggatacatgggctttccagcaacttgatgtgggccaagagtggaagaggcaggaggtttaccaaaatggaacagcatcaacacagagccaaccgtatattgcagctcttctcagttctggccattgcctggttgggacttgattttccattagagaattatcttatcgattttgcttccattagatgcagctttgtctgacgtattcctcacccaggtctcagggttggtaactgtgctggacagtgggaatgctgggtaactgttagctgtggcatgggtacatctgccagtcagatgactgccacacctttgatgatttctctttgtgacactcgtctctggtccccctgtggcagccaaatcacaaggcaccacgagttcatctatattggagcagcaaagtctctcaggagattggaggtgtggtttatcttaaaggctgttagtgatacttggagttttctgtggttgagcgtctgtgctacagggtatgttatgttcagactttaatgtctacttaagaactgtataaggttgacaatttgatcgattattttctttatgtatcttttcatatgtaacaagggaataaagaactcagcttctaagctggttttgaggcttaaatcaattaacacgtgtaagtgcttagtaataactggtatgtagaatatgataaatgttagtcttctcattcattttttttttgccactcattcattcacaactcctatttaatgagtggctattatatgccaaaaaaaaatctagtcaaaatactggggattaacgggaaattcatgactttgtgggatttgaaaaataagctcagtcagaaatgcacactccatgttagaggtgatggtctattttaaaccacattggaggaaagacaccattgcattgtagaccccgaggaagggaggcagagcagggtgttgttgttgttgcaatcagaataggttctacagcagcagccctggcacaaaggagaggggaaagggacagggctgagtcatgtcatgaactggtgtggggtgaggtaggaagcctttgtgggatttgttctcttttgttttaaaaagaccaccctggctgctgaactgagagtgtcctcaagggtcaaagggagggtgggagtggggtgagcagtcaggaggctgcccttgtgattcaggtgcagatagtaatgtctcagccacatagtagaggtggcaaggagcaatcaaggtttacacagtttttttttttaattatatatatttgttagttagggttttactattgtgaacagacatcatgaccaaggcaactcttataaggacaacatttaattggggctggcttacaggtccagaggttcactccatcattatcaaggtgggagcaggatagcatccaggcaggcatggtgcaggagaagctgagagttctacatcttcatctgaaggctgctagcagaatactgacttccaggcatctaggatgagggtcttaaagcccacacccatagtgacacacttactccaacagagccacacttcctaatagtgccactccctgggctgagcatatacaaactaccattatgtctatatgtatatgtatgtatgtgtatgtatctatatatatatatatatatcatacagaccatgcttttcttaggcatagatagctataatatttaattattatattattataaattagttttaatgaactaacaataataactggtgatacaattggatatgtataatgtactagaataaagtcaccaaagtcacaactcttgtgtgttaggatcattcttattaagtagatttctccaacatagcaactgttacactataacattccactctacatggatagctactacatgactaatgggtcggtggcacttagggagtggatacgctgtctagaggaaggacttttttcagggcagggtggagcagaagagattttatcactactcagaaaggtgtttaaatatattatttatatatttctgaattttcttttattatttttaggcaggggtgactagggagattggaagtttgcaatgggaaactgcagggggtggatgctactttgtgttttgcagacctcagatgtggcacatacctctggtgtcagttgttgtacccttggtatgtgccgtagctgtctctggcaggcagctacaagctcagactcacagcaagggcatacatctttttctctcttctatcagggctcctctggaccttacaagctacataagagagttaaccatccagggaaacatctccccagtaggaaaggaaacaattggaaaatgcccaaggctctgtggatgcgtgctcaatgagcttttctggagagcaagcagtactgagccctggatgcccacagcagtgacgctaacaaagccccatcacctgctttctctctcctgtcaatcattctccccacccctcctcttgattcagtctttccattttgtaaaagaaactataagcagcaggactggattctgtctccccggagactgagtatagatggatagagaactgagggtggggcagctcagcatgcagggcagccatcctcacccaaggtcataattgcaatgcaaagcagtgtgctaccccatgcatgcccgggcctctctcgaggagattaaagctggaccccttgggagtgggccatggcaccactctctgggtaagtatagtacccattttgcacagagaaccacttaggtttagagacaggggaggcaaagacccagtgaaggagactaagggatgccagaaaaggatgaagaggaacctggaggccaaagggaaagcattttcaggaaaaggaaattgtaccacatgctgccagtgggtgaagctagagagtcaacagtgattaaaaaatattttattttaattactctattagtaattatttattagtagtattattaatatgcatctaacattattcaaatactaagtcaatgcagatgacaaaaatttattataatcagtctacttctgtttgatcagggtcatggaacaaactcaggagctaacctgagacccacccaccccccttatacctgctagaatgttacagagcttttaaacctgaaaaccataaacacctatgctaagttgcagttacatgtctccatcaaccagaattcaggggcaggggactatcctaggaacatttctttgtattatacttatttgatcgcattagttgctttgtttaactgttggggaggggggcaacttacccaatattcatgtgtcaacctgccattcatggaggtcttgggaacttaagctttgtttgacacctgttcaaaatggaggttttattcaaaatggcttcagtttggttccttcctacagtattagtattactattatctgagacagagtttctctatgtaaccctgggtgtcttggaacttgctctgtagatcaggttggcctcaaacctacagagatctccctgcctgtccttccaaactgctcagattaaaggcatgtatcatcactggggaattttttttaaaactacttttttaacattaactttttgagaatctcatttatgaaaatactgtattcacatcatttctactctcctctgtcttcttccctgtcctcctacttcctaaattcatgttcttgttttctttattatttttgcacacatacaaacataaacacaacctgctgagttcatttagtgttgctgtatgtgtatgtgtttagggctgaccacctgggattaggtaacctctaaggggcttgtcttagttagggttttactgctgtgaacagacaccatgaccaaagcaactcttataagggcaacatttaaatggagctggtttacaggttcagaggttcagtcctttatcatccaggtgggagctgggcagcatccagacaggcaggcaggcagatgtgggtctaaaggagctgagagttctgcatcttcctctgaaggctgctagcagaaaactgacttccaggcatcttgggtgaagatcttaagcccacaccacacagtgacacacctactccagcagggccacacctcctaatagtgccactccctgggaggagcatatacaaaccatcacaaggctcatccctgaagaagaccgattcttcctcttttagcagccgttattaattgtctgcgctcttcatctaggggtggggacttgtgagatttaccccattaatgttgtgatgtcaacttgtgttgtcattgtgcaggtcttgcttaggtgactatattgttatttcatgagtgcaacttcctcgtcacatatagagaaacttatttcttagcagatatcccagtcctcttataatttttctgcctcctcttctgtggtgtttcctaagccttaggttgtagggggtagtgagcagaagttgaaagcggaaagaccgaagttggcatcagtcaatatcagcaacggggaatggagaaatgaaacactagctggaggcagaagtcagaccaggcgatagctttttccagtgaagagagaactctgaggactcagagagaagagctgaccagtgttggtaagagccagtgccttagaaagcctgcatctgtagggggctggagcagggtctttctgcagtgaaaaagggcagtgttaatacctgtgcagacaatagcccagctgtagaaattcccattggctagcccagtggttctcagccttcctgggggcctccctttattttgtggtgactcctagccttaagatgatctttgttgctacttcatatctgagattttgctacagttatgtggattgtcaggacccacaggttgagaatgactgtgataaccgaaggaagttcttatgaacatgaacgtgttgtgtgatggccctgtctcattcagaggtgtccactagtacgcatagcgacaatgggtcgtgtgtcaggagcaagtcttcttgcagtttgccaactcttcacatacttaaacacatgtacaaccgccttttaatacgcacagaaacaaaaagcaaatgcacacacacaaatccatttattattatttttttcagagagggacctggagtcaaggctgaatgtgttctgaaattctgttcaaagccacacgggggcaccattcctttaaaagtgaggtgctgtgcatccaatttctgtcactacagagttggtggccttcacatttgactcacattggagcttctttccctttttttaaacaaacagttcttgtgagtcgtgataatgaaatattttgggcaactcacagagtatttcaaacatgatggttccttcctttttagtgttatctgacccaggagggaccactcatttttagagccatctcctgggcaatctttttctttctattctgtgtaggacagagtaggctggcaatacatgctgtagatgagcagttaacccaacactgtggtcatacctcgcatacagtaagtgaaagtagacatctgaaaggatttggaagaaacctctgtctccctaattatccttcattctttatttccagggtctcagcatgctatggtgtaaaagacaaatatacagttttttggtgggtgatgtatttgtgtgtgtacaagtgtgtatgtatgtgtgtccacatgtgtgtaggtgcgaacacccgtgtagaggtgggaggttgatgctggtatttttgtcaattgcttttcctcttctccctccttcccttctcctccttgtcaccccctccttcttcatttgaggcaggatctctcattgaacctgctcctcaccgtttcgactagattagctggccagtaagcttggaagacctgcctgcctgtcttcatctctcgacctccaacctctgcaccactgtggttacaggtgcttaccgctgggcctggcttttaaatgggtgctggggatccgaattttacccaccgacccatctctctagcccatgattaagtcttttggataaagcttcctgtctccagaaaagtcatcagacttatttatgcaaatcaaaatggaggtttgtgagatagggtgaggttaggagagaaacagaatttaccggtctaacagggtagcctcggttggttgtaagtagcttagcccgaatgacaagttagcactgggtttcagctagctagttttgcaagcctcgaatgaatgatgtatgcaatactgacacagtcgtatgatgacgtgcttaaggggaaagatgcagtgttctgtttgtgtcctagttagctagcgtgctaagtaaacaagcaaagctaaagtactatatagtcttttaatactattttgggggcaatctaatagcaagccacagtgctctctgtgtaaaagctttacggaagctgcttagttacggaagaaacagaaagggtaaaacattgcttcccaactagacatatcgactttcttcgttgttcattgtacatctttgtgaatatcagccactgctgtgataaacagctgtatgtacctctaggacacagataggtcttagctacagggttaaaccttatctgcctggctttctggtaatgtttacactttcaattttttgagttaaaatttaattctccaaaaagctatttgaagttaactcttggcattaatatgaactttgtactgccatccccatagtggtctgttctctctctctctctctcctctctctctccctcccccctctctctccatatatatatacatatatgtatatacatacatatatgtatatatatgtatatatatacacatacacacactttgtgcagacaaactttagttttggttttgttgaacgtcttcaacttttctaagcacattgtcaaaaagcagaagctcaagcaacttcaaaacagcactgaattcctcactataatcacttggagtgcagtgagtacagttgtgggctttgaggtttgctagtgcttaagctccagccagtatagagagcctcctcccggctacagtctcctgtctgcctttggtgtaagacgtacaattcttagctcctcctccagcaccaagtctgcccgcatgatgccatgcttccccacgctgataatggactggacctctgccagtgtaagccagccccacttaaatgtttgccattgtaagagcctgtctccttcacattcaggttttacctccactgttttagatgacgtaatccttggctttcctttcgagggtgtcctcttctaggtatgcttaaattttagccccgccaccagccttgttctgtgttaactgtcaacactagctatggtcttctgcttgtgtcatctgcgacctagaccatagccagaaatcagaacaacctcccatcaactgcccacagtgcccttcacaaactactgaacagcactgccttcctccacggtcagagctcatggaagatgaagagtttgtccactttgctctcttatgtccagttcacttctcagacaaaaacagttggcttctcgcctgttaccccacaccaagatgctctctgaaaagtcttcgtgactgtctgccaaattccgacttcatagagtgttccgatcagaagcatcttgtctttctgagaacgctccttaccgtggcttctgggatactcctgtgccttggttgggttccagcccttcttactgcatcttctgtttcctcatttacacgctttgctatagttctctgtggttctgacttgatcacactttcactccatattttcttttattttttattttagatttatttatttattatatgtaagtacactgtagctgttctcagatactccagaagagggcatcggatttcgttatggatggttgtgagccaccatgtggctgctgggatttgaactcaggaccttcggaagagcagtcagcgctcttaaccactgagccatctcgccagccccgtaatttctttggataaatcccaacttatcatttttttattttagttttgagatgtttttagaaggtcagtggtaaactcgtctgtcaaatgtcatcatctgtggagtcacagcatctcagtcacttcagaggatccttcaaaatgggagcatccactcttgggtaggcttttgctcaatagctgtcagtgtatgagaaatgttgtaactctgctgtagagactatagtgactaagacctgttagtgggtgttgctatttcactggctagatttcatctcattaccttgcctccctttccacatattgcctaagagtcttttaaaagttaaacagatgcatgatttcgcaaccatctttctggatgaagtttagagtctcattagtgaactggcttttcagctgtttccttgttaagtgcttgcctagactcattggattggcttctgtttcctgtagtttcgggcatatattatagtttaacttttttgtttagtattatttttcccattggaacacagaaaaaaaaatcaccaaaagcaaaaagaatatttacaacaggggctggagaggtggctcagtggtcaagagtgcttacttctcttgcagaactccttgactcattcagttcccagtactcacacggtggctcacaaccacctctacctccagttccaagggacccaatggcttcttctgacaggtgcaggttcctgtgtgtctatggtgcacacacattcacataaattaagtaaatgaaaaaaattaaataagaatactcagcatattggaaggttacaatcacaaaacctcttcatagcctctattttctgtcttggcatagtatacgctctacccttgggatatgccctgttcttagatgggcgtcaattctgggagtcctcctcagagaagaagaagtaagattactatatagacctcaccaaatatcaaaagaacatagaaatgctgggatatgtttctcagttaaaccatcatgaccctgactctcagtatagagaggctcttctcctgaagggcagagcctatggcaaacatggccaacccagagcactaggtgggacttgagacagaagtcagtaccatgggctgtatgtcctcaaattggagacatagaaactcaatgatttcctcctgaatctgttagagctttacttacctcctagaccctctctgtcccctcaacactgtgactgattctcaagctagtggtccctcctaatcctttgccctaccacaggcactgctaacttggccgagatttccacatctgggtcctattttcttatattacagcagccatatgcatcatttaacatttccagaatgtaagtcagagaacagggggaagcttccaagcttattgaggaatacatccattctcgcatcagtttttatacacggatgtgtgtgcatatccatgcacaaatatttgatgggcatataatagccacttaccattagcctccttttaaaatttgtcattctattccttttggtttggaggggacactaccttctatcatattatcagaaacccttttgttaacctgtgtatttttctactactcatctttgcagatgtctacccatctgtccctcctcacctgcttccgctcaggtgggtccattcatgcacatactcatccatttatcatccactcattgacgatgtcctgaacacagcgctgtgctgtcactgttagatacagggaactccaaggcttgggtcatcattttccttttcttacatatactacttccaaacttctgagcagttctgatccgcaggggaaggaggtttgaaagattcttatatacaaagacctacccaaggcagatgtgccaggaagtggttcagaacaacttctgtcacccacttttatgatagaaatagagttcgcttgggtaagtgtccccaagagcctgcattgctgtaaaaaaaatactgccaactgcaagcacttacaccaggctggcccctgcctaactgacaaatatgatctctatacaatcatcaattcagcacccatgtcagagacagatcatgctactcatcagaccttccctctcccccctcagtgctcagcagacctgccctctcccccctcagtgctcagcagaccttccctctcccccctcagtgctcagcagaccttccctctcccccctcagtgctcagcagaccttccctctcccccctcagtgctcagcagacctgcccccttgacgttacccagcaggtcagtggtcagcagtttgcttggagtcctactgattttgttgttgttgttgtttttggtttggtttttttttgttttgttttgttttgttttgttttgttttgagacagggtttccctgtggagccctggctgctgtcctagaattctctctgtagaccaggctggcctcaaattcacagagatcctcctgcctctgcctcctggttgggattaaaggcgtgtgcctccatacctgacctctacattcctacttttaagctccctcactttcacagttattttaaatgggaagttttctcaaatgtgtgtgtgtgtatgtatgtatatatatatgtgtgtgtgtgtgtgtgtgtgtgtgtatgtgtatatatatatatgtgtgtatttatattcacacatatatatacacatttatatacacatatgtctatattaaatgtattatataaaatgtaaacatatatattatatatatttttaacatgtctgaaaatcgcctttctctcaggagagtggatgtttatggtctcagccttgttgcccacaggtctcagagtttctctggatgctgtgccgtaagtgtttcctctctggacccttccttcatctttcatcaaggtgaggctcatcacacatcccattgttccctccacactcttgcttgtagtcttaagccgcccggaaaaccagacaacttttagaaaaacatgtggaatgagaagtaaggggctctggccaaaggtctggggagagttctgagccataaaatacaacaggtttattgttttcaaagttttcttttcttttttcttttattttccttcccagagggctttctcaaaaaaggccattttctctttttcagtttcccactggatatggaagctgattcatgtcaccgcagcctcttactagttgcgcttgcataggttattatttttcaagcgtggtctgtgttagaaccacctgtgttagaatcactgcaggtgatgtaaaatgcaagtctgtatgagcgactgcttatgcacacgtggaatcagaacttctgggtgcagggctcaagaacagacatttctgtcatgggcgccctgcgtttgagaatgactggagtggcaaggagctgtgtttttaatctcatctaagcctgacttaaatttcctccagtcacaaatgcttgggatggaagtgtctcgctcttctaactctggaatgtttgctcgttcataatgaggcatcctgggaaggggacccacgtcgaaacattgaacttattcgtgatatgtgtgtggccgtgtacacttggtagagacagcctatgggtaatttcattccgtgtgtgtagtgtgcctggattttcataattatgcaccatttgaagtgactcttttcactttagaattaggatgtggaatttccacttgtgacgacctgttggtatcttaggctttccattgccatgataaaataccatggccaagagcaacttgggaagcgcttagttcaggttacacccccatgccacagcccatcctcaaaagttagggcagggatgaatacaaaggccacggagggaggagtgctgcttactggcttagcctgctttcttccaccatcctggaccatctgcacagggttgatatgacaccccacccctgagagataggcatcaatcaccaatcaagaaaatgtacccacagccttgcccactggtctatctggtgtggatattctcagttggaattccttcttccaaaatgactctagcctgtgtcaagttgacatgaaaactagccagcacagttgacattcagggagttttgggtactagagtatttttacatctgaatttgtagattaaggccacttgacctgtatttacatatccgtgggatgctcagggaaataggaaatcccagtggctcaaagtgcagactctggagattggctgtctaccttataatctcagttctgatgcttgctactaaatggtgtaggataacatatggacgctctttgtccccagtttccctgtatgtaaaatggagataataaaaatatctacctcatggggtagcttagccactaaaggacataaaatttagagcaataatcatacagtgaatggaatgttagctattacagcggttgtgcttttgtgggctgcctacggcatcatttttgtggtttagttagtccaaagcaaagttattgcctagtatataaaaacatctctctagtcacctttgtgcctgagcatgcatgaatgaacacacacatcatgaatgacttgtcatgacctggcttgactgcacagctacagatccccatcatggtgacagtcgcgcctacctcttgaaagcaaaatgtctacatctgaagacacatcactgctataagtcttaatattttatagcaatcttaatgtcaaattgtgagacatgcaggaggcttcaatccagaggagtggctttaagctgagatagggagaagggtgtaccaggttatgcattctttacaagagttttactggtttctatggcaacttgaattcaaaatagggtcctagaagcccctttggggggtagggaaaggatgcaggcttcattccttctgtagagatagaatatatagtttgtgcaaaacattttttggatgggatttttgtgagttatcctaccatggctggctgtgtctggcttgtagtttggcccctcccccttcttcctgtatctctcaatgagagttgcaagctgccctacagtgctcacttggctatgaatagctagtgtttgccttgttgctcataacagatgcactgactaatagtatagtaattagtaagaaaagagagcaactgtacacagttcccaggttagcaagtcaacctatttctagtagcaactttctacttttgagtagatagtttttgaaggaaaaaaaaaaaaaaaaagcacttccaaattgaatcccatgagtgaaagggaaagacttctgaggatgctgattgaagtaagaacaacactttcctgccattggtggacaccctgaggaggatttgggatggcaaggtttattctgtacctttcttcctgcccactgtagaactgatcagctcttccccatcaccttcactctgggacctggatggcagaacaacactggtgtgcaactttgccgattccgtggtcttggagaagaacacagtaaatgcatatgttggctggtctccacgcacttttacccatggttcacacgccatgtctgagccatagtgtccagacatgtggtgagaagtctgcagcagggacaccagagctgagacaggaaggatgggtggggcgtgttttggagatggtagtggtggggagtaatgatagaagcagagaatttagagatggaagaaatggtccattcagccgtagggccttcctagactccctgtgtccagccagtggagtgtgaacactaactgtcactggcaggggtgtggctccagggtaaagatgtgctcacataagcccttggtttgatccctgggaacataggaaaacccagtcacatgtgttagttcaagtctagccttcttttcatcttagaattggagaattgaggtctcatggatatgacaaatgggttctttgtgttaacataacagcatattctgtaccttaaaattcacattttcctcttgtttctatcctcttgcttaacattattttggataattaaattacgcatgcaaattcctcatcacagtagaactcaatggctacaagaacaatttcgtaattagttctctgagccattaaagccctggaagatgaaaatggtctagaagattgtttccccatggtagttttcttatattgatttgaaactgtgactcctttgcattgcactaaaactatccgtatgaaggaagctgcagaagaggtttgccctggaccaagggtatttccaaggcatggtgtactgttcagtggcatgtttgagctggacgtgagcacatttttgaagcccgttcactgtctcctggttgtcgatttgtctaaggccagtgagacgcaaccagaaggtagaggtggttacacgtaacaggtcattacagaagaaaagccagggtaccagagaagccttatcgtgaatcagtcctcagaggctctggaaagcctcctgggacagatggagtcttatatgcatgaacatcagttacactgaagtggaaggaacagagtacatgtgtggggtatgtgcctcagggttaacatgacccttggggctagtatgctctggggaccttctggaagtgctctggctattccccatccctcttttatgaaggtgtcctacatttccaacacacaagagtaattgctaccagtccatgccacctggagttgtcttgcaatagcagtgacaaagcacccctgtggaccgtggagtacagggcaggcacatgacgacatgaacatgttcatggaccctttgctttgtgtgataccagcataggagaaaacgtgcctgctgccttagatgaatccactgttctgtgactatacagcagggtgtggtcagtgcttagcatatcccagcatcccaaagggagctgtggatgttttccccatcacttgaaaggcctgaattatttaagcaggaagcttatcttcaaaagagatgtgggaattaagtgaaagagatccttgattgtggagacagggaagcctcccacaatcgggacaagctgggaaatctgtagatggtgatatcggttagaagcacagcacaagctcatcccacagcgtattaaggagactgggccccgtgtagagatcaggctctcatgagtgaagcattgtgagtcttacagtcctgccttgggaagggtgtcttgaagaggttccgggaagtcgtctttgtgctggggaaaaggactcacattggtgaagttttagtgatcgatttttgccccttcctggccttttcttgggagtttctctcctgcgtaaccccctagaagttccattctggcagctgctgaggaaatatgggcttagtgatatatcccagccacacagtctttgctatgcgctgttctctttcattatcaattctgtatatacctactttttaaaaagataatttaatttattttaaattatgtgtatatatgtgtgtctatgtgtgggtatgtgtccaagagtataggtacccgaagaggccagaagagggaattggatccctggagctggagttataggcagttgtgaactgctcagagtgggtgctgggaactgaagctaggtcctctggaaaagcaggaagggctgttaaccactgagctatctctccagttccatcttttcgtatttatttatttatttatttatttatctctttatttagtgtgtgagccatctctccagttccatcttttcatattgattgattgattgattgtgtatgtgtacgtgtgtgtgtgtgtgtgtgtgtgtatgtgtctgtgtgtgtgtctgtaccacctcagcatgcatgtgcctcctgtctacgactgtccactctgtgcacccctgactgccatcattcacagtgctgggctatagtcaacctttcagagatccccagggaaggagagtgctcttgtgttcagaatctagctctggatttgctagctgggtgaccatatgccatttgttctctgcgtctcaggtttatccacctccacccaagtcattggtgatgtgaacactgaaggtatcccagggttcacactaaaatcagcatgggccatggcgtctgtttttggcgtgtttgccacgcccttgttcacgttcttctactgtaccaattgaggatgctatctcatcgtcactttcggtagctctattacttctgccccactgaatctgaaatgaacttaagtcctaaaaatcttcccatgttctggattgttaagcccgccagttgtatcctgttaaacgtgagtaacaagtatctcaatgggagaatagcatctacctcacaggcttgacctgctgtgtggcttgccatggcacgtgtaacataaatggcatactgtctaaaatatggtaaaaaagaagacatgctagccataatctttatcatcgctacttgtttaacacagcttaagttaatggttccagatgtaacgcagtcagtgaagattattagcgaatctaacagagaaagggaactctacttaaagctaatgagctcatggtaagttagtggctgagtgcaataggtgatcaggaaaacgtaaatgtttggacactgttcattgattgttcctgttttctcgtagtttagatttatttttattatttcaagttatatatgtgtatgtggaggggctatgtgcacatgtgtgagtacaggtgccttcggaggccagaggcattgagtcatcccagagctggagcaacaggtggccgtgagccatccggcgtgggcacagggaccggaaccctgcaagggcagtgcacacacttaactgcttagtcattgctccagcccctcaaccctttaacgcttgctataatttaaaatttgaattgcaatatatctatatctatatctatttatatatatttcaaccctagataaaaagataagacatcacttggttatttcttaaagtgtgctgtactctctagcattcaatcagttaaatatttaatttacttacttatttctgacacagagtcttgtttatgtagctcagtctggccttgaactcaagaccttcttgcttctgtctaccagtgctcatatttgcatgtgtcctttttcttgatggttttgagcaggtggctctcacaacaggagaaggaaaaagaccaggacaattaggtatcagatgtctgcagagggagactgggctgactgcagactgaaggtatccagacgctgactgtattttcctgtgttgtcttgaaaacctcggtccacagctgcacaagcatagcatagagcaggccattgctcgagcacagatgttgctgtgtgcttatgtgcaggcgaggatcctccctacaccggatcaactttaattttagagtagttgtagatgtacagatggccctgtagtcatcaccaagggtttctgggcctatcctgggggggaaggggtatattcctgccctattatcatctgactgtagtctggcacatttgttatagttaatggactggtaatattgactttgcttcatttagatttccttagctttagcctggtccccctgactccccacccccttttgtcttaaggtcacacccaggatgccacatgatatgtagttgtcacatctgctaggctactttgggatgtgacagttttctctggcctattttccacccgctttgagctaatttttaagaggtgtcctttctcgactcagggaagtgcaggatggtgatattcatagggacattcaactccctcgtgaatctttccatcaacaaatacttacagtacttagagatgaagtagctgaacctaacaaaggagccacagtacattgccttccttgtctcatgccaagccactttgcccttcacagtgtttgaagattcccccggggatcttgttaaaatgcagacttgtttggaactttcacagcgggggtcagggttttgtgtttttaacaagctcccaggtgcagccatgccacccctcctcacccttaggatgcagaccccacacttaggcagagctccacaccggctagtgagagcctggggaaggatggaggatggagtggtaggtaaactgcatgtctgccagcaagatgtttgcaacttagagaacaaaacgggagaaataacctagacacagaagactcagtcttgtgggattcggtacatacgaggtattaaatgcagagacagaaagtaaagtgggatcacagctgtctcggggaggagggaatggggagttggtgttagatgtgtacagactcagtttgtacaatgagaagattttggaggtggatggcaatgaaagttgcacaaaaaaaaaaaaaaaaaaaaaaaagcatgtcgttaataccaccgaacggcacatttaaaaaattgtcaaagtagcaatatttctggtgtgtgtattctaccacaattgaaaacactctttaaaaagacactgtgagggctggagaagttaagagcactggctgctcttccagaggtctcaggttcaactcccagcacccacatggcagcttacaactctaactccagttgcaggggatctgatggtgcttaacacagacacaaaacagtgcccataaaccaaaaataaaaaattgcttaaaagactaggtgttagagttgtcaggagaaagatgaatgatgtcagtagaagttcagacatggaacttgggtaatgtgacaggcacaacgtgcttatagactcatttctaacaatgctttgaggcagccacttgtcatcttgctgtccagatgacaggatcaagaagggtcacagaatgggtttggagggctgttttagtcagtgaagtacttgctattaattcatcaggacctgagttagatcttcagacccaaaatggaaaagccaggcgtggtggcatgtcgctgtaacccctgtgtgagggaggtagaggcagacagaaccctgaggctccttggccagtcagcctagtgtgaagagctctgggctaaataagagactctgtttcaaaaaccaagttgtccagctcctagacaccacaccaagactgatctctggtccttacatgcattctttagggtctcaacagtgtcttccatggtcgatagtcaacatacatgggaacagtttaaagcaagatgacggggcccatgggactgttgtgaattgaggagagcatgtcccattcaaccaaaattccagggacttaggccactgataggcttgggtaatattgaaagttgggaggtcctcagatccctgatgatgtgcgtgcggcctgcgtcatgggcatgcaagaccataagacacatggtgcatgtcttcctggctgtgtcagtagagtaggaatgagtgcagtttcaccaagtgccgtaactatgatgtttgtaatacagcaaggatgggtggagtaactcctgagggtaggcagtgtcctgagcactctgctgtggcctctaatgacccattcactcatggttgttatctctgtcggccacagggcagagcgggccaggatgagcacagcagaaacccagggtgaactggttgcacttgtactactgttaattaactccagctttctgaaagctgctgcttttgtttcttcatggcactgtactacaagagcaatttaaacaggaaccgctagatgtcgccacccagtgtttcttaaatgtggcagaagcaagggacagggcaattctccctctaccttgaagacaatggagcaaaagctcgatcatttatgacttcctgttggaaagtgtcaccctgagcagctaccacagtggactatctcctttccaccctttgccttagctgactgtttgcttgtgggttttttttttctttttctttttaattttacaaaaggcaatgggaactgtcatttcatacgtcagcttcttcccacaccaactacaggagctgctgtaggcaggaggggaggacagaattgaccacaggggctttggtggaggtgggggtggggggaagggaaggagtgagggaggagggaaggagagtaggggtaggaaaggcagcttgcttcctatttaaatgcacttatgaattgcaccagtgctataattaggcccttactcccagcactggcaggagcgcagcaaatatatgctcagcagaggcacagtggaccttgtaaattgtgtgagacagcaaggagcacctgggcagggaggcgagagggtcctgcgcctcttggtagcagagggtgatggagggacacgtgctgttggctttttcagaagacaggagaggggaggagaagcttcatgctgccctggatagaggaaactcactcgtttagcactgagttatccagtgtgcgggctctgcttcaagtgcccacagaagagaatcacattgagcaaatcagtcaagtaaggcttccctctttcccagctccaggcactttctcttctgtgaacttgcagaggattctctagctctaaatcccatcaatacagtgacagatgactttttttttttaactcagtgcatctaaggcagacagtgaagagaacgttctttaaaacaacgatatgtaacacagacaaaggtaggcagggaggtggtgggggaccacgggaaaaccttggagcattcatgggaactcatctcttagcttttgggcaggaggttgaagtacacagggtgaattgggagctgattgaaaggcagggctgaaaaggctgcgagaacggctgcacagagctttgggagactctggaaaatcaaaagaatggtgcagagcaatgctttcaactcaaggaggaagaggtcagccacagaccaaacgctgtgctttctagagccttgcagaaatggtttgtgatcaggtagaaggcaatgctttgcctcggcaatagaaggaatttgaaaaaaaataatgtattgtttaactatgtgtacctttgcgtgggtctctgtgtgcacatacacatggagggcagaagagggcagcagattcgctctagctggagataaagtgggtgtaaggtgcccaacagatagtggggaccaaacttgggtcctctgcacaaggaacaagtgttcttaactgataagccatggctcttgctcgaagaatggtttattacattttatttatttatttgtttgtttgtctatctatctacctatttatttatttatttatttatttgatttacagtgtgtatgggggtagggtacatgcatgccacaacatgcgggtgaaggtcagaaagcagcttgcaggtgtctcttttctccttccactattttggtccctgcagcaagtgcctttactccctgtgccatctcactagcctgacagcacacattttgaaaatttggaacaacactattgaagctttcctttgtgttattaatccatacagagactttgtgttaatccacgaaatgcaaagactaagctctctcaagtgggaacactgctaacattagtcgtaacttctcctcactggagggaatcaaaattacttccatctgcgtcccgcgtcatcgccaacaccacctagaagggaactggaattcatattcattcattcacactcaggacattcagataggaagactgctgtgaatttgaagccagactgaactaatagggagtttcagggtaggccgggctacagaatgagagtgtgcatctctgtctctcataccatataaaaacaatagcaacactaataagaccctactacacatttgagccatgtattatcttatgggattccataaacagaggacccccaaagagatgggaatttccccaggaatctcattctgggagaaaaaaaagggtgccagcccagagtgggaagttgtctgctgggaagagattttacacagctttaataacctttcagaccatcttacaggatgagacagaagcccagacaatgaagagctgacatttggcaggaccacaccttgaccaggactgcctgaagacacagattgacttgggggtggggaggtcactggattgttttgttcctgtatgtttgatagacggtaggaagatgagcaccccaagacccagcacctaggggttcaataacttgtccaaggtgataatattctagtaggatatgttgcatatttgacctcatatggattctaactaaaatgaatagattccattaataacgactttgtttggaggaagtaccttctgagtctttctgtgcagactctagggcgtggcactctgctacctcagagctgatgtatgtgcagacagacagcccagcaatacatctcctatcagtgtcagtgccatataatgtgtgtggcacttaaaaaatccttaaaataatatattcctaagtcattgaaagagtaccaacataaatgtttaaagcaagcagaaaagggggtgagggagaaactcatcttgcaactgttttttttgttttgttttgttttgttttgttttgtttttgtttttcaagaccgattctctgtgtagccctggctgtcctggaactcactctgtagatcaggctggcctcgaactcagaaatccaccttcctctgcctctgcctctgcctcccaagtgctggaattaaaggcgtgtaccactactgcccggcttaaaacaaacaaacaaacaaacaaacaaacaaacaaaccaaccgtgtagcccaggcttgtctcgtgatcctcctgcctctgcctccttcagcaaatcctactggtgtgcaccactacctgcaggactgtgtttaggaaggtgtgtggtgccaggagttccagcgttcatgtgcctccttcaggcctttcctaagccactgaagggtggtctgcagcttcttctgtggccttacactgagtgtgtgagtgtgtgtgtgtgtgtgtgtgtgtgtgtgtgtgtgtgtaacttttgggaatcctgagccctttcaggtcattctctggtaggataactgacagcattttcttccctcccccaccctccctccttgccatttctgtgtttggaataacatctgctatgcagcaagccacaaggtttacccattgccatcctttgatctcactatgtatctaggatagctttgaactcatgggaaacaaagtatcctactgcctccgcctcctgtggagctgagactataggcctgcaccactgcacttggctagaaacaaaatttttgaagacaattaaacatcacatgtccctggtattttgtcatagtttcgccctctacccactgctgccttgctacttcctggttctccatagcccctgggctccctcttgcttgaatcacagcctgctggaagctccttcctcccagagcacttcttactccaggattcatgttttcaaaaactagatggactctgccttgattaagggggcttttgctcatgcctcagctcccagcagacagaggatcccaaagaaatggaattttccccagtaatctcatacctggggaaggaaagaatgttagctcagaggggcatcttgtctccagggaagagattttacacagctccaacaacttttcagaccatcttataggatgtgactataagtctttggcaggaccacaccttgaccaggattggttagatgtgtgtacccttggtccctgtttaaactttgatatcactgaagtcctgaagacaaagaaggacttagggggttcactggctcactttgtccctttttccattgaataaagctttttttctgcttttttacttttaagttggctctttttattggcaccttgaggtcagtggtcagagctgatttggggcacaggttgtgacgccgccgcccccccccccaagtctgctaacactatctccttccacctcccctgtgcaaggtttcccggaccaggcagactgtccagaggctggccacaatggcgatgtaggccatgctctgaatgcagcctcctgggcttgggtctggatggctgttaattactgtaccctttggcaggtcagccaataatgtgtaaactgcacgttctgctggtgctttcaaggtaggttgtggagatggttcggtgcttagagtaatacttgcgattccgtaagcatgaggaagccttagctgcctcagtaacagctgcaggtgagagcctccatgaagagccactggctcggtcactgtggaatgggcgggtctgtgctcgtatggcacctggttgtatttctgttcaccctgtgcctggatctcatgggagggattcctactcacctccacaagtctctataccagggctgagggcccagacttgaaagtgatgcagagtacctctgctgagaataggtggctgtcttagttagggttttactgctgtgaacagacaccatgaccaaggcaagtcttataaaaagcaacatttaattggggctggcttacaggttcagaggttcagtccattatcatcaaggtgggagcatggcagcatccaggcagacatggcgcaggaggagctgagagttctgtatcttcatccaaaggctgctagtggaagactgacttccaggcaactagagtgaggatcttatacccacacccacagtgacacacccattccaaccaggttacacctattccaacaaggccactccttcagatggtgccactccctggtccaaggatatacaaaccatcacagtggccgagtggacatggggaggtggatagggagatcaccaggtgaggtgactaggtcaacagcaatactaagaatgatgtacactgtaatggttttaattcttgggtggcatttacgcttgtcgagagcaaactctgggatggaagaggcttcctctatgactcgagcatgttaattttgagtgttcttcaagatcgcttgtcctggggtgagctggtctcctaactgtaagaacaaaaacaactaagagtattaacatcactgcatccttgcgaacagatagacggcaagctatttccaactatagtatattatcctgtaatataagatacctgtggtgggagtgggaatcggaaactagagccacaagaagctcatccacaaagggaaagcttaatcaggaatcccagctgactgcctcaacgtccctagctgacttctggtggatgtttgtaagcccttgctttgataatgttatctattgattgcattcttaaccgggctactctggttgtctctgcttgttttgagcagtttgaaaatttatcttctacttctctctgcttactttaacttgctagatccttaataaactcccccactcaggactgaaaacagggctatcactgatcatccagattatatagaacaactgagaaggaaatgctttggtgaaagagaagtaaagagtctagacacgctgagcttgtgtgttgtgagtctagacatgcatcagtaacaatgatgactgacaaccagggccatagtggaccacactgatggagtaatatgctctggtctctgtacccagcccccnnnnnnnnnnnnnnnnnnnnccctgcccccccccccccccgagactctgactcacctatttccacaacagtttaatgaagaggaccccagatgcagactggttaaatcacttgtgtaaggccattctgctaattgcggtcagacagtctagagccatagcttacacatttcccactactctccctaaactctgtgtctgtagtttcagaggatggcaggtctgaacatacaggcatatatgataaggaataatattgccagaaataccaaattgccaaagcattgtaatgtatacctttgattctagcgcttgggaggtagaggcggaagaattactaactcaaggcagcttcagctatgtagggcatttatggtcagcctgggctacatgagatcttgactcaaaacaaacaacaaacaaacccatccacaggtggtagaatttgacataggatacagtctcagctttcagttcccatgggagaccctaaagaatgttataggtgttggctgaaagagtatccttttctggctttggtgaacatcatagttgaagatgcaattatgtgacagaaggtgggaaaaagttcccagtgaagtccacattacattgatacattattggttgtcgccctcccttcacctttcagtcaacaaggtttctttataatgcttgcaaattccttaacttagcactcttgaccgagaagggtgaagtgttactatagagggtacctaggaagaaacagatgtgggagcagactcctagctcgacactccctgctgagttttatttaacaaagaatatacgaagtagtatagtataatgaaacacttgttatgtcctggagtttgttagtaattttcatttaactttaagagtggcgtagcctggactgaaacaaaaccaagtgtggctgctaatggtttatttgtactctataagccatgtttaattacacaagagcaggttgaacactgtggctctcagctctcactgtgcattagaactaccaaggagcttggagaaattgcacacctaaccccaaccccttccgtttcagtccagggacacgagaatagaagtgtggagagaagcgtggctggggatgtttgttgtgttgactagtgcatagttaatatagttgtgctgccaaatcgagagactggagtaaaggttttgctctcattccacaaattcatagaaatgatttttctctggagatataaagtgtgggatccttagcagaactggaaataataaaggtgcatacacttaaatgacagaaaattttggtgcattgctggaagacatcaggagatgaacttaggtggctggagagatggctcagcagttaagagcactgactgctcttccagaggtcctgagttcaattcccagcaaccacatggtggttcacaaccatcttctgttctgtttgtattcatacacattaaataaatacatttaaaaaaaaagaagatggacttagattaggagaacagatagtccccacccctcacccccaagcccatgtgcactgcccaaggtgaacacacagctgggaaacctagaggagacgttccgaagtaactttagttggcctctgagtgatgatcagggtaattaattaaaagacactcagttcccacgttgtttcattggttaaaccacttaaggcagcatttgttcccaagctaaagctacaagaataaacctgtgataggctttgggtctgagtcattgtcattctcatttaggtggcagagggaagcaggtggtacctctgaggcttgagaactcccgagttcctcctactttggggaagggcaggttaccttgcttgctggatacccaaggggaatcctagctgtctacttcctggtctgtgtatttgagaattcccacagatgggagctgaagtcaggagagagaccaggtatgactatgtgggctgaccatagcatcgtgctgataatccacatttggcttgggcagtgggttcttagccatgtcaatcactgattcttctgggtgttctgagtggacatattctttgcctgtgtgacgtgtgtgtgtgtgtgtgtgtgtgtgtgtgtgtgtgtgaagtaacaagagtgaggctgacaagcatggctgatttcttcatagccttcctcattctcaggtgtatgggtgaaccatagcagttcccacaataaaataacactgtggtccccgttttataagatacttaagggactcttgtcaagttgatatggtgcagggttcagatgcagatatatggacttttgggtaagttttttgttattgaatgcaccaaactgatagattaatgaagctaaaaatattgagcagttttttcaaatgatggctcttgtgtaggtggaaaagggggttctctggtggcgctgctgggcatggagcatcctaaacacagtaccggtgccctgggccccagtggaagggcagtgttgctgtaggaagagttgacttaggaatttgattatgagtgggtgggttgtgtgtttgagtttcttggcacttaactcagtggtgtaagacaacagttatttttttcatagtttggaaggtggtgagtttggtatctagttgtgagtagggttatcttcttttaagggcagcagagaagagtctattcattttctggtggccgttgacatcactcactgttctgtgtctccattactccagcctccagcatcccatcatctctgcaattcttcatcttccctcctctctcatgaggctacttggtgttacatctctgacctattcctaaccgaagatgccctcgtttcaatatctttaactttagttaagttttcaaatcctgacaccccaaataaggtgatgtttaggtactctggggatttgaacacagtcgtgtttcattggaggtgggaggcgccattcaactcactacagggtggacatattttctttactcatttttcagggtgaaattagcctctggaagtaaggacctgctccaactgtctaagtaaaagtaatcaccccctaggggcacatgcctgcaatctcagcagttgtgaagtggagacaagagaaccagcctggagtatgtgagaataaacagataggcagacagttctggctagttatatgtcaccttgacacaagctagggtcaaagaggaagggctccaattaagaaaatgcctccataggatctggctgaaaacaagcctatagggcattttcttaattagtgatcagttaaggagggcctggccctgtcgcgtccgctctcgaccagcaagaacgacacgaccaccagtccttctaacagcagtttattcagtcctgattcttcttgtttatatctcccccgaaccttgggcctctcactccttttatactctcatccacgcacagcaggccacgccgcctcaccaggcacgcagcttcagctaatcagggcagtaggggcatatctccatcaaactggattcaccggtatcctggtgcacctgcgcagctctcaagatgtttgtggcttatatgaggaagtcaggtgcaagtcatacgacttagctacagtccctggcgcctttgggactgccgccacacccgctcctaacatggcccaatgtgaatggggccatctctggactggtggtcctgggttctataagagagcagactgagcaagccgtgcagagcaagccagtaagtagcatccctccatgggtactacatcagcttccgcctccaggttcctgtcctgtttgagttcctgtcctgccttccttcagtgatgaacagtaatgtgaaagtgtaagctgaataaactgtttccttctcaagttgcttttggtcatggtgtttcactgcagcaataggaacattaatcaagacacagacaaacggaaattaagaagctcttggctttcaaaccccatgatgtctgtttattcagtcattggtacaaatcatttctagacactagtttcatgttttgttttgtttttttcaagactactaacaagtaccagatgtcagtgggggaactggggttcttctttctccttccctgtctctgccggtgtttcctgcgactccatctcttccaaaccttggagttttccagtcttggaaactgttattcaaaagagagaaaataaaagaaatgagaaaaacattctttattgttggaaaggaatgtcaagtttgctcagctccaaggacagaaaggagggggaaacttgtgcagagagtgtggacactgggctatttagttttgagttactaacattcttcagtttacagatggaaaaaaataaaagagagaaagccaggaggattatgtaaggtcacttggcaagtcgtgggctgacccagcattaatactcggggcttctgggtcctcagttctgaacctccaagacacaatgcttgtccagttcttcctccattaatccttggctgtctgggcagcgcatgaaggtctcgacactcccagccaaatgaacacatgggagagaagctaagttcagatttgctacttttgagccgaattcaatagatgagaagaggaaatggaggctgtgattgtgttattcaggctgtggggtggatgtaagcagatggagttttaaattccatgctagtatcagttactgcagtgcattccctgaacccaggtaagctgctgaagtcaatggatttagagaaaggtaaccacaagggctgggagatggctcagtgggtaaggtactcgtggtatacaagtgtgatggcctgagtttggatccccagcatttatgtagaagtgggctatggtggcactggggggtgggggcacatctacaagcagatccttggggctccctggaaaaactagtactgccaaaattatgagctccaaaatcagtgagagagcctgtatcaagaaataagatagaaagaacagtaggcatattaatgtggaaggggggatatttgcagagtctacccctagacaaaggaactaccggctgttggctgctggggagagaatcagcctctctcagggatgagccctcttattggttatccaatgcaaaatgaaaccatagatacacaaacaacaaaaaatgggatcagcaagtgataactacatatacatatatattctattatttatatgtgtgtatgtgtgaaacaaatatgatcaaagaaaaaggctattaacttgaaagtgtcagggtatgagaagggttcacgggaaggcacttgggagttagaaaagagaggaaaaagttggggaggtgatacaattctatctcaattaaaaacattaaaaaataaatgtcattctaataacaataagaaaataagatggaaagtgacagacaaagatgcagtgttgacctctagccttcatatgggaactcatgagcagctgtgcccctccccatgtggacacacacacataaattccacccaaaaccacacacatgcatacatatacacacatatgcacacacatgcatgcacacatacacacacatacatacacacatatacacacatatgcaaacatgcagacacatacatgcacatacatacacacatatacacacatatgcacgcacatgcacacacacacatgtacacacacacacacacacacacacacattcaacaacaaaacgaagacagtctccttaataacaacttgctctgattgtgtaagtacaggctcctcttgtagacttcgaccttcttcgccaggtcacctctccaataacttggtagctataaacctacttggggacataaatatttcaataaatatttatgaaataaataatatttattgaaaaccagtccaaggacacgttttcttcatcccaggaagcacaatagcgctcatgaacattcctgggtgggtggtgtacacagctccaatgccaggttcttccaggatgtagccttagtaatgctattggcgcgcgcatcagttcgtgtacaaattcaaggccttcttggagggggttaacacttatcaagcctagtgtattatccttctcttgtgttagccatgtttctgaacagctaccagttacagatcttatattcaaatagctcaccagggatgttttctcatctgacctcacagtgaccttggcgcctgagagcctgaaagagttttcattacacaacggactgaagaacactcctggtgtgtgtctgaggggagagtcggtttggcagctaccttggcacttaatgcttgccaacctctcagcaagcatgcttgccaacttggagggccagcagtactttagaatgtgttttgttgagtataaactttggaaaacatttcagccagtttctgcaaacttttctaatcccatgtgtgatcagcatgtgggcttcaagtctaagtctgctttctgttttcactcgctggggcacaaaagtcataaagatttgcaagcgcggagggcccatgcttgaatgtcctatctgctagtctgtgtgaagatcccatgaggtctcttgtggagcagggacccttttccagataacaggtagaaatataacctgtaccgttaggatggctggcttactagcatgtttgtgttcggatgtgttcctttagattttatcaactcatcgaggctataaaaatggttcctagcttctgacttgtgtgtgtgtgtgcgcgcgagcgtgcgtgcgtgcatgtgtgtgtgtttggagagagagagagagagagagggagagagagagagagagggagaatgtccctttgtgtataactcactctttagtatctctcgtaatctgtcttcttggcctgcgtacttttcacctaaatgttggtccatttgtaccgtgcccccttcttcctacaaactctgatttgactaaatttccctctcctgcgccatctctcctggacccaaagctccaattattgtctccaagcacacacatgggttttctgagtcaaacctaaataggatccacaaattattttgtctctaagagtgcttctggatataggtatgtaccaaaactatgtttcagagcctgaccttattcgagaggcatccttgtcctgacttctcacacttccggaagagtgtaccagagttgagaaccttgtgagatccactcacacagccctgccagtgggcgccaggtggtgatgactgaatttggaagctgacgaaggtgtcattttgacagttcatagaactgaggttttgctgtgtgcatggcttagaaaaccatctaggctgtagaatcttttcaaggcctctttagtgacacagcttgacctagtctttggagaagtgaaagtcactcaaagggtgttccatgttcagttcacactggctaagtgcttgagggtgtcagtgtctcctaggacaacagaatgagtccccttgagtaacgtaagaaatgataggaagcattgcatttctaacttgacctgtgggcagcatatggcttccttgggagctggcttgcatttgaataacccgagaatcatgttattatggtctgggaagcagctatgttatttctggagagaccaggaactttgtactgagaagtcagggccttccggggacctcgtcggaggaactcaccctggcaagagttctggccagtgtctgttgtatttgttttcgtgacatcattttactaagtccctcaagtctataattgctttaatgttgcattcttcatccttgaaagaaaaactaataaagcaaggagcgaatgtgcgtttattgtttcatacccccccagggcggggggggaatgagggaaatggaagagaaaagcactttttaaaaaataacgaatctagcatggtgatggcccgtgcatgtaatcctactaacctgtggctcaacgaactggagttctgggtcattctcaggacagcctgggctacatgggactttgtctcaagatacttgccctcctccccctatcagcatgtacagtcttattccagggctgaggaaatggctcagtgaagaaacggcttgctggctaaacatgaaaatgtgaatttggattttttggctcacacatagccaggcacggtagtgcccacttataatcacgttactgggtaagggcagagataggcaggctacaggggttccctgtccagccagacttgctgagagattgagtttctggttcagtgagagacctcatttcagaaaaaaataaggtagaatgtaatagagggagacatcctgatggccacatgcttgcacatgcatataccatacacaaataagtcaagagagtcttagcctgaggtcaagctggctcttggggcttcatgcatcctctcctggctcaccttcaacttcagctcagctgagatagacagttcctccatgtgcagcctgcttcttttacttcttggaactcaaaggttttctcccttgatgtcagaagagcttgcttgagccaagcctgtcctcagataggactggtcacttcctctctgccaatagggcaggagtgttgacagttaagtgcatcagcccgctgtcctttgagggcaggttttgttacttggtgtgtctcatggcaccaagcccacttgcaagcttttgtaagcagcgatatacccttggttggccttccttctttctctgatcccatctcttgtctccctcactctcatatcttgtgatctttctggaagacctgaggtttcgctctcagggaaggcagattgacagctaccatcccaggaagatgagggagccaatactaacacttctttcaaactcttctttgaatttcctggaaagataactttttcaagtgtaaaaaaaaaaaaaaaaaaaaaaaagaaagaaattaaatttggaagtcagaaagcctgaaggagcggattccggtgcttattattatggtagagaaagaccctcagactctctgctttggcctgcagggtctctttatttttaaatttctcatctgtagttattgacatgctacttggcacgttttcagagtttgacaactagagtccattcccagtgcagaaccatttgtgtaaaatcatgtgtaagaggacgcagtggagggttgtctgctcaactgtgtgtctccaggtagataaagaatggaaagcgattgttctggttgtttagggccagcatgtgaagatagccccgagaacaccgtagagccatgcaaacaagctccagggaagagcgactcaccaggctgaactccggtcaatccagggttgctggttctagttatcgattaataagagccaaactggacctccaaaaatggaatcacggttctcagaatcaaggctaatctggaactaaagtgtgcgttagttagaagaggtgagtggctcacctcccaagtttgaaggccacagcctttcccaaagggcttttatgacagtcatgtgttggagataatctgagccttatcacaaagaggctcccgtcagagaccttctgatgttaggacaggtttaaagagaaacaggctaagcagttttaatataatttgctttcttatgcttgccattgcaaagttagtcttactaggcattgccatttcatacagacaaaccagcattcccagttaaaagataacatttaaaaggacattttatccagatattctcaaggtttcggtggtcccacatgctgtcttattgagcagttttgaagcagctccttggtttttctttatctcctcgtaatgtagctgactgattacttccttgttctgtttgcttgctcacatgaaattgcatctccttaggatccatgatacatgtgcccacaatgttagccagagagagtataaaacgaatcagatgtgttcaatacaaatgttctttaccgatggcgaaatttagtcccagaccttggaaaactctattaaagatgttgagtgagactgtccagcaggtactgtggtagtggtcaaataaccaaatattgtgctgtccagtgcccatccttcctggagttgaagctcttcctggtgtgccggttcctgcctgagcctgggaaagcccacagcagacaggtaatcctaactgaagtggtggggtggagccacaagatggctcccttctgcagggcttccagatagaattgtctagactgattttcacatgacccatgagggggtgtgaagaaggtagagcatttgtttgaggaaggatgctcagggaatgtgcttagacatctgggagcacttaagtataagcactgggaaccccagcatgggatgacctggaaggctgtatggggaaccataacgagagatggggctgggcacaccagaacggggcatcttatccccaaccatgttttgaacttcgcatttaaaagacagtatttgcttatttgtgtgtatgtgtgcacgcatgtctttggacttgtgaagaggtcaaaggaaaacttgagggagcgaggaagtgcttgctccttccaccacgcccatggatcaaacataggtaggtcattggggcagcaacttcctttaacccccaggccatcttaccagcccaagagttcacaatttatctcatagataaggtactgtggttaccatttgagctgtcatttgttgactgtgttgatagtcaagatgtgcgtggcatgtaaggttgcggtatgaccaaaaaggaggtgtgagctagggaagagccaggaaggaactggagaaaaagagcattcagcagttgttagggtgaagaatagcaaactggagttcagtggcaaggaaggtcaacagagtgaggaatggctttcacatttccagctgggcagatggtattattctttgttataaacaggggctcgatttggaagaaaatggtgataagtttttaactggacctgacaagtccaacctagctgtcagacatccaaggagggatgtgttctgagcagccaaattggtggttttggaaatccagatttgactaggcatatctacttatggaaagtagatctctgaaaatatttgagaggtggccagaggcgaagccccaacaaaggaacttgaaaaaccatgacctgagagctagaagccaagccagagagacatgccacagacacagggaaacaggagaatgtctagcagaagggaggccagcagcaccaggagtcaggcgaggactgttagacacagtgactgagctcacctgtaagctttgcaagggcagtttgagtcaaggtggagatgaaggctggattaggataaaggaagaacatgggacaaatgaagccttgtgggccagtggtagtgatagatacactctcaatatgggccgcgaaggacaggcagaccgaggtgtatggctggaaaaggagccagggagaagtggttggtatatgagattaacggggtattggtatactgctgtgcataagtgaggctagccagttgtattgagagagcactcagagtttatgttgaggctgatactttgcagttctgaacacgggtggctcagactgaagaggaggaaggagacttcttgacaaatggactagaaagaggcttagtcttctgggcagaacaggaagttgactcttatgtttacggcctatggagcagattgtgaaataatttgtnnnnnnnnnnnnnnnnnnnnnnnnnnnnnnnnnnnnnnnnnnnnnnnnnnnnnnnnnnnnnnnnnnnnnnnnnnnnnnnnnnnnnnnnnnnnnnnnnnnnnnnnnnnnnnnnnnnnnnnnnnnnnnnnnnnnnnnnnnnnnnnnnnnnnnnnnnnnnnnnnnnnnnnnnnnnnnnnnnnnnnnnnnnnnnnnnnnnnnnnnnnnnnnnnnnnnnnnnnnnnnnnnnnnnnnnnnnnnnnnnnnnnnnnnnnnnnnnnnnnnnnnnnnnnnnnnnnnnnnnnnnnnnnnnnnnnnnnnnnnnnnnnnnnnnnnnnnnnnnnnnnnnnnnnnnnnnnnnnnnnnnnnnnnnnnnnnnnnnnnnnnnnnnnnnnnnnnnnnnnnnnnnnnnnnnnnnnnnnnnnnnnnnnnnnnnnnnnnnnnnnnnnnnnnnnnnnnnnnnnnnnnnnnnnnnnnnnnnnnnnnnnnnnnnnnnnnnnnnnnnnnnnnnnnnnnnnnnnnnnnnnnnnnnnnnnnnnnnnnnnnnnnnnnnnnnnnnnnnnnnnnnnnnnnnnnnnnnnntctttgcaggtatttttttttttttttttttttttttttgagaacggctcaaactgactaaagtgagaggctggaaggtggcctgaggtaatctctgtaatgtgagtagctgggatttccttcatctgtctgttagccgcctcagcatagtacggaaaaggtttttgatttcgtgtgagttggtgaaatgggaaaagcccatgtactgaatcaaagcatgggtgggtaaggcctggagggacccgtggggtgagaactgcggaaggaggggaattgagaaggcagttagaggcatgattggagttttatccttggacaagaagctgggtttgtctgtccctttgatgttgtctgttgtcctctttgatttttgtttgggggaaaaaccatacacgatgacattaatctacagtttataaactccagtaacttttcaggaagatttctaatttactctgatttctagactaactgtatcctcgtcgtccagcctttcagaccgctgtgtttcagttggtgatagattatttggtaaggaagagaacattgaaaaaagatctcgtggactcagaattttaagagagaagccctgtctctgatggttatgtgtaaagagttgtttttagcgagattatctgagcagccgaagatggatagtgcatagtgaaagagacgttgtcactataaatggaaatctacaaaaggggagccgctgagcttggtgggccccaccggccctgtgaatcactctcctgcacgcacacccttactcagttatctgagctagcagcttctgaagtggcactaaatttagacagtaaaataaaggaagagaggggagagggcgggtgtggtggtttgcggtgacacttgccagtgcttaggtgtgaaggtgcgaccttgtgacttgcagtctcgggtgtgtgtcctgtttgctactttcagcaccagagctggttgtcttgctaataatgcccctttaatttagctcaaagcaccagagagactcccttcctttggaatgtgtcaccgcagctgatggtgcttagtgctgtgccttggtttttcctggcctgaggctttttttttttttttttttttttttttttttttttgagggtgatgtccatggaagaaacaacccaacctcaggcaaagtagtttcaaccaagcgagccagttgaagtacccgctggactgcagctgtatatcttaaagaatgtttattgcaacatgaagatttaatttttcaagttcagatagcctatccaccaattgtcagttaattcttcggttggcatactgacgccggagcatggtggtaattttccagaaaggacacaagaattcactggaacccccattttatttaccaaagtaaaaccagtcccttgctcttcttgctgggaaatcaagtgcaaattttccacagtctttggctcacccatgccctctgacccaatagttactgcacacacacgttgtcagcacttacatttctcccctatctattcttccatgacgggttctggggtagtaggagtggccacgtttagcacctgagaggagaaggaagaaacataaaaataactcatgaagagctccccgtgctagtgattgctaagagttcatttagacccctcatcctcctaggatggtagctgtcaatctgccttccctggtctggtccctctgcttgtcccacccagggaggaattgtttgcagctactacacttggtccagcacagcggaagtagctgattgcctgggcttttcttatgctagtagataccagctaaatagattatgccactgttgacaggcagataacttttccctatctccttctctttattctccctggagtgttagacaacctagtttgaagagtgtgcagaggtgagctccttccatttcaggtggagtatgctacatacaacatcaccttcaatagccacagacggttccagtgtgcttaacaggggggcataagtggcagtttgaagatgcatgggggattcaaggtgggttggaggacccactgtggtttcatatttgtgtaaacttcactgtaaatcagcagttaatagggactcatatgcctggcccacagactgcagaagagtctctgtattgaaagaattggcagtttgaaaattcataccaggcgtgctcatcttctctgtgtcaacacttcagctaggcgctgggtgcgtcgccgtttagatgacttccttttcctgtaaaggaagaacgttcttagaaatgagactaacagccgtgatcaaggttgtatcacggaggaaatggcgcttttacaggctgatgcttcatggatgtatggtcagacccgtggagcaaaattatacttttgggaataaaaaacaaatgtcttattcatatactgatgactgtatgcccatccatttaatgcatgtgatatcaaactagagtgatcctaagccaatggtttcccagtcagatgcccagtagagtagttatgggctttttagaaaacatgggctatatagcctttagtatttgagtttctggactgcaagaggaattttaaatatctccaaaagcaactctaacccgtcatgtctgatagccctgatacactttttctgtagttttctagaaaacagccgaagtctctagtgtttagatatagacattcctctttcagagaaactaagttagccatgcttataaaaatattgtatatattcacattcatttatttgctagcacagctgaaaataaaaactgtggtggcatgcaatttattccatagaaagttagcagtttaaaaattgtaccccccaaaaccaatgtattcaataaaagatgtcaaatatgatgtgtaggcagttgtgattttaagataaaaaccaactagactagtaccttctactcatctcactgctggtgataggactatgggtggaactctaggttgagctaataggatgtaaatcggtgtaatttttccatgcaaaaattggcagtatgatcaagaggcttaaaatgctcctactctttggctaaagcatatctgggaatatagcccagaaaaatagtctgaattgcagaccggtataattcagacttttttgtatttaaaacaatggaatggcgcagtttgcccatatatgatgtattatagaattttgatatattgtacttattaggaggttttaataacttgaggatatgctaatgttgctattgatagaatgtagaagtttacacagggcacattctaaatgtaaaagaaaatacatgcagacagggaaagaataccgaaataacagcaatcatatcttggtaagaagaccacagatttctatccgtgtctatctcaggttttcaataatactcatttaagagcacattttacttttaagattaaaaggaaacatccattcagtgctttgaaggcaaatatttcctgaaagcgttggccattgggagccccttgcattgaatcagtctgttaagagaagactggggacgaagttcacttgaccttaacgcttacgtggctttgagccatataggtagcaaggaaagcgaactgaaatacaggtaaactgagacacctgcagaagaaatacaatgaaaaaaattttttattttgtttttatgacagggtcttgtgtagcccaggctaacctccaattcacaacgaactggccccagccttctgagtgatggcattgggccgctatgtggggattacggtgttccaggttcagggttgtgtgatgtcagtgagcattccgtggcttctgatgctgttccccttatgtggatcagctagatgtcaaatgaatgcatttggtaaaagctgacaggtaaaagaatggaagccttccggttaggaaataagtgtgtttgttccttctccttctgagcttcgtttttttaatagttggtttacttaattgaggataaagtaatgatgtcaaagttgctgggttggttgatgacttcctattcaagtaagacgccccatggattatctgcctgacaccgctcttcaacttaaaactttaatggagaactgtgaagggaactagttgagaaacacttctcaactggccagttccccacaatatttctattctcatgcctgctgctagtactctgagaacccaaatgatgtattattgaactttctggaatagataatcagtgtgcgttagcatcttgctttacatactaaccctcaaagcatgttgacatagccattctgtgctcatggggcccgcaggtcagagagccacagggaatgggatgactaggcagcgtttttacactgattaccacttagctgtcttgtgatgtcatctatttatttaaacctaatttgaggttgaaagagtaaccaaaagaactattataaataatttgcctaaactaccagttttaaaaattatgaagtggttgcatctcacagttgataagaaaatagattctggaggctcgtaagatcagtgggtcaggtagtgtttatagcttcccctcccacacagaattcagacatccagtgagccagaggtgctataaggcatgtaatatataaatatttatttgagtataattatttcaaattctttagcctgtctcttttaaacgtgaaaattcatgttttgttaaaacacaatactaaataattttgtaaaggcatgtgtgagcattcgtgttactaaagttttgtttgtgcttgtgggacgtacttatataagtactgggtcatggtgtgtattcttttatttttctactgaagcaactgcgccttaattgttacttcttctccaacttgcactatcttctatggagattactgttatttttcttggatagttgatgtgagaaccacttctgagatttggagtttaaactgagtaattcagtttgtttccattcctgccttttgagggaaggcttttggactcagttctcccgcaaatgttccatctagtactgcagaggaaatgaccaagcaaactgggaattaacacaagtgatattgaaaatccaagtcttccagaacaagtcccctggggcttggctgaaaagtggcgactgtctctttgtagtgactgacctaaagggcccagctgaagcttttctctgagtccatttattagggcttcaaaaaaaaaaaaaatcagtgtaaaatctctcccccccccatcactgaacattttttgtttgtttgtttctcagaaaatatgtcagctcagcattctatttctaatgtgcagggtggggggtggggaagatggggatttgctatcgataaccatccttgcagtgttttagcattttgtgaaataaaaattagaggaaattatataatgtagtgggttgcctttctccaagtccaggttttgtttctgggcatgttttcaaatgacctctgagttttagtatatatataataaatataggtatatatatatttaaaatatatctaacttaggaaatatactgccatgaaaaattccccatctttccagaatttattctaatagaatagaaatgcctttcacttaataatgtcgacttatttatttatttattcacatcacaaacatttcctgcttccagccccccccccccacaacattcctccccatccccctctccttttcctctgaggaggtgggccttcccaagttcctctcccccatccctccaacctggtgcatcaagtctctgtaggataagacctctccctctgaggccagacatggcagccctgctggggaatggatactacaatcaggcgacagctttaggggagagcctcctctccccgttgttgggagacacacatggagactaagctgcatgtctgctacatatgtgctgggggcctcagtccagcccatgtatgctatttggttggtggctcagcctctgagagctcccagaggtccaggctagttgactttattgttcttcctgtggtgttcctatcccctttagggcctttaatccaacccctaactcttccataaaggtccctgacccctgtccaatggttggctgtgggtatctgcatttggttcagccagctgctgggtaaagcctctcagagggcagttatgctaggctcctgtctacaagcaaaacagtatcattaatagcatcaaggactagtgctcatccatgggatgggtctcaagttggacaggctattggttggccattcctacagtctcttctccatctttgtccctgcatttcttttagccaggacaaatgagtttctttattctgttaactttttacgatgagttcgaggttctctgtaaaatgcttcattgtaccacatctaaacaaacaggccaaagagtatgtggtacagacattcccatcttggggaataagttgtacttggtgtgtaagttgtacatgtgacttttgttcccaggcttttggttagggcacagttaacatctggtgcagctgagacagtggaaggtagtaaggttcaacttagagaaccatgtgcttggacatgaaactggctttattgtaaaatgggagaaatggaaaagaactgcccaggcttttagtcatctttgtcacatataagaatagggttcacagctcggtagtgtgcccaagacaccattctctcttgacaccccagagagtgacagacactgagaacagtcagccggaaggctaagactaatcagttgcctgagatgatcctatcgatgcccagcagtaaagagctaggaccacttctggaaagatctagagtggtcagtattttggagttagacagctcttcttgtttctccttgtggttttagcatgctggggttggggtggggacccaaagctgcacagagtatggcacaacttgagatacacagtccccttattgtagaatttactttgcagaatgtatctgtcatgctacctccagtcactttgttctactgtttttctgtgcttcagttatttgcctgttactgtattaggcactgagtcagcggaaggatgcctaagccatagagtctgcttttgaggggtatgtggtatggctttcctgatggccaataagtgtttttccacaattacatttagggaaatatccgagttctatctccatcctacccacatgtcccccaccaatgtcccatctgaacatctggtctacccaagaagagctcccacgttcacacaagcccaactcagatctaagttcctgacacaggttttacagtttataattagttttctaactcctaaatagccctaaaattgacctataagtttttagctcatctatttctctttatacttactgtctagtctctacgagacaagactgtatgattacctaggcagaaaggactcagggtttagaatgtagcttcctgcacttggagttcaggtcttagaactgtaatcttttgagacttttctatggaataaagtgtgtagtgtgtaaagctgagcaagacatatctcttccttttgaattttcatcttgtcacagagacatctatctaccagaggtctcatactgtggtgtgcttagctcaccagcaggggtacaggagagcagaggaccaagggattttagaagaactattacttgtgagagaagtgctttgggaagagacaagggctgggatgtaacatgaaggcatcacccttccagaaggggatgggggatggagaggcagggatcatcagtcaagtgtggaaacgtggaagttgatgagatcttgtttctatcaaccaaccatccaatcaacaaacaacaactgtccccaaacactttcccttaatgtattgtcagttattcttttgaaacaaagatgttgctaaaacagcacaccaatgccatacctagattatatgatttataagcacttggatctgagcagactcctgcttctcagcaaaagcataaaggtaatttagtgagagatattcatggtccacaacctaaaagcaacacaaaccaagcaaaccctcacattttactttggaacttgttttgttggttactacactgttttgacagccaaggtacaggccgaaccaaggattcaagacagttgtgaactattgggtatttggaaagccaatcatgcacaagatactatacttggtaatgggttcatgttgttgactaaagtgctacatatgtgatggtttgactaagagtgtcccccataggctcatttgtttgaattcttagtcattagagagtagcattacttgtgtaggaggtgtggccttgttgatgtggcttttttagaggaagtgtgtcactttgaggtttcaaaagcccaagctaggactggtgacctcccttgttgcctgtggatatagacatagaattcccagttccttttccagtactttgtcggccggtgtggtacctgccatgacaacaatggaccaaacctctgaaactgtaagccagccacaattaaatgcttccccttataagagttgtctggtgtctcttcaaagcaacaaaacactagtcaagataccataggactcacattcccatgagctatggactttatccatcattttcacctgtgtgtgctcatgggaggaagtagagttcagagtaaagggtcaggatagacaaaccctggttatagatggtaatgaatgtattcaaggactctgggttggttatacactggagagagtgcagaagaaggaatctaagaaatgaaatcctgtgctagttcatgttcgggatttgacctttattttaaaatagtgagaaggcattaagagaacttttaatagagacaacacaatctggtttttttttttttttttttttttttttttggaagagattttaggtggcccacaagaatggatggacttttactgggtatcaaatcctcaaagggaaggcatacacacacacacacacacacacacacacacacacaccctaaaagtagtacaaaatagaaaatttcacaaattgaacattaatacctaacccaaccccaaaccatttatcctctggagcaaatctagaatcattgggtggaaggagccccacattggtgggaggggtctgggccacaccaagtagtgctttggtagctgattcatctgtgctggctcaggattcatctcaggctgctctcttcctgcttcccactcctgctgaagctctgcagataaaagggattacgtcccatttctcatcggtgtttctcaaaatgtgagagcttcgagcacggccttctccttggtccaggtcttgcttcagaatgtctgtggaagcctgtcatcctccagttggctttgtggccacagccatttcttgatctgagtgttcctggtcttactgtggctgtgaggagcagtcagtgacttacagctaaagctggaattggaaccttagtaacaggatggggaggggagccatggaataatctcctaggtgtgttttggaaaataaataatatagcatttatgaaaattgtggcattataggacttttcccccaagagtttgactcttttttttttcccaacagaaatttgagaaggtaagagattctgagtaatatgtcaatcataggggaatctgtcactttctggcaagttgagtaggccatgggtatttttattttatataccttaccttcactcactcttttatgaattatgaagtattttcttctgaatccatcaaacatgacagggaagaggggaactggtccacatagtcttacctggggtatctcaagagttttctgtctctgcctctttatccttacctctgtctttctattctcctttcgcctcctggttttgatcagtagtagcatttgctatagggtcttcctgagggtgctttcctaggcaatggggtgggatgtgtgtgtgtgtgtgggggggggtaataaaataaacaattggagaggctaacatgagatcaggagagcacaccagagaccagagattctggagtgctgggaggtagaggcactccagggaacatgccaacattagcataaggagccatcatccaccaggccagataaagcaggtaggcagccggaaggagctggcatgaagctaagtagggcaacaggaggcaggatgctagtctcagctttggtcacagaacccaggcacctaagtgggaattgacaggatcaggcgtgtatcaggtgcaactatttggaaatttactccataggcaaagggttgtagaagctgtcactatgcacagtgcacggtgcatgtccttccaggagcagcctatacacctctgcttatactctacttaccttaaacaaaagccaagtctcccactctgtgtcacttgtgccttccatgtattgcattagcgcatcagctcctgaactcacctgttaccttatggttacagatgaggcccagagggattccagaacatgcctgggtagtaaggacaaacccagaacactgtagcaaaagcccgacaagatgtagaatcccacatctgtttttgaatttttctttgcttattcccctttcttctatgttgccactacctgtctggggaagtcagggcagagccaaagctatagaagccacatttgcactaccccacagagatctagatgcaaggaatgcttaagtgcttgcagagaaaaggagaaagtcagttagcagagcatggacagcatcaaaatagcagtgtaagcccagggctaaattgccaaagggcttgagcttgtattcggtccatagagccaacaggaaggctgggcgtcctgtctcctctctctggacctctcagagtcctgccatagaatatataattacattggcttagaagagttaggtttcagagaaatctggcaggaaaaaagtgggtatcaatttcttttaaaacttctaaaactgctccaactgtcttgttcatgcttacccacaattcacagcatgccaccttactctcacctttctgtttccctctgttgtccttaccaaacattagaggatgaaaatcctgggtctgctattttccagaaaacctcacagatttgctgaatcacaaggctcagtgtttggtaaagaaggctaacttctcatagatcaccaaagctagaggaagaaattttgtcttgttatatcaggtggtttggtaagggccttgccatttcctcgaccttaccaaaacagttgagacatttgtcaaacaccaacaagcagctctccaagaactgtgtaggatttgtacatagaagcatcctggtggcgccttcgtgcagaatcttctgactcggagccactgatttaaggagaggtgaaaggaagtgggtttgtggaaaccctgtcaggagagcaccctcaaattgggctagcctctgtgggaggttctgtggttttggaagccactcagcagcgagagagagatgtggcactgaagaataccaacacaggatgagcctcagggatttccgagaatcccagtttaatgtgaggtaggagatgagaggaggaagtgatgtcgtcttttcagcctggaaaactcagtgtcaaaagtgggaggatcccatctttagtttctttgcatttcttgctgggggtggggtgggggatatactcttaaactttggcttttggaatttgaacctgatggagccatgggactcctttatcgaaagctggggacttgagacggtgtgaaacaggaggctttgagggacctttcagaacttccaagccaggcagagcattcggggacagagatggccagttcccgcgtccttctagagttctaagttcctttttctgttgatgcccaagagtcccagaaacaagtccctcaccaaggttcttctgaactctgggttcagcatgcatacacacattcatatacaagaatatatatcacatatacacannnnnnnnnnnnnnnnnnnngaggggaggggaggagaggggaggaggagataaaggaggaggagggggaagaggaggctttgaagaaatcaatttatttttttaaatgtctggattgaatgacttctggggtcccttattggcttgtgattctgagtcagacatatttctctgattcctgggaagcaggcagaggcagccttctcctgccactgtcactcctgcccttcctgagcaagaagagtatgggtttgcaaggaataacacaactgctgctcttgactctggacctctggacccgcaagctagcctgagtcagatggcagactgttgtatgagatactcgtgatgcaagctcctgctctggacaacccacctcttaggcctggtgttagcattagcagacagtgctagatgaaggggggcagttgagccttgcaggatttctcagcagggagtgtttcacccattttggtcaattctgaaaacagaccacttcttttttctctttttaatggactcttgtttaaaaataatcaggaaacagctatactctcagttgcaatagtaaagtaaaaaaactatcctggagaatttgaggaaaaaaaaaaaaccttgtcttcgctggagttccttattggcttgtgattctgagtcagacatattcctgggtaggcacagactcaaagatgatagctatcctgtgtgagtttgtcatctagggagtctggaggacccagtctggaggtcaccttgccatcttctagatttgaaagggattaggtattgagagatgcaaacgtgactgaaagccagcagtggttggaccatcatagacgtggaagaagggatgtcagctgctctcagctctggtagctcttgggttacttttgatgacttggtttgctgctctggacttaggcctttcagactgactggaggaatggcctcctttctcaggtctgggccggtgactccttgctgaggtcctgtgagctacagccaatgacttctggctgacaaagcagggttgttgctggtaagtgtttatgtctcacttcggagctgcaaagttctttctccgagttatttcttccctcagagtctgaagcccgcagaggcagtgcctgactggcctaggtcagctggtaagttagtggcaaagctgatacggcgttgctgggttatttcttaccccatgattcatacagtttctcaagatgatgctatttgccccttaccaatttctttccaattttagctggattctttttagtgtgggctgtaggttttcctgggtcaggctgcaatctattactggtgagcagacagccataggtaagtgggggaactctatctcaggtgaccccattatagaatttgtcctccatcagcgtgaggatggtgtgggaacagagggttggggtgagaccttcctgtgtgacttgtggggaaggagcagcagtgttcgggattattagagatacgggaaatagtggtataagaagcagagggaggagtctcgcagaagcatagtctgttacttaagaggaattttaaataaattgaactaaaagaatgttcaattctgcacctaaaagttgagaggttttggctacctctacagacttcactagtggcacaagagtgttatcttgccagtaaggcagagagagacactggtgaaaatatggaaaacttttcctatacaaatgccacaaaccttaccatctggtattttatctactttccttcatttagattaaaattttctctatgacttagtgtcccttaacttaagtcacctctgcaaagtacagatgttggatggagatcggtgtctgcctatgcctgtctttatgaaatactcaaaaaataaaacctctcttttgctccctcctccaactgtgcatttaacaaagaggatgaatggctgtaattcgagtatctgatagccctccttcctaaacattgaaacagccttttggctactgctaagtgttcgttgtagagctagcaatgcgtgagaaacaggaagcatctctgtgctgggtaggatgctcagagtcaccctccactctctcagggaacgctcttcagctgactgaagcaggggagctgagccaatcagaggccgctttcctagctctgtcaccagtctgtgcttgaggaaggcttttgctttttatgctctgtattggagaggcagataaaatgccaggtctgcatgtctctggggataacctcgccctgtatgatgtgaacgaataacatcttgcctggtaaatccacaggaattgataaggcagcgcagctcttccaaagaggccttttattattattattttttcttttaagctctagctgtggtttctgcagcaattttgtttttgccttaaaagaggtgctgtggattattacacctccatgtatgacaatttgtacctgcatggagttgaagactcggaggctgtaagtatttcatagatagccggttccctctctcctcctcttcctcctcccactcccccctcctatttcttaggcaacgcaggaaacatggagctgaaagccaacagcattggggtgcttgctggcagctgtgtatgctctgtgtagtgtgtagctaactgaaatcatttattgtcaagcaaaagggcaattaacttgatagcaaaggcatctaagagaataggttgttgggatttctctgtgaccagggccagggttgattcatgatgggtaactgccccttgtagactggcttaaactatgcagaaagtgctgttttttccagtagcggggttcacgggaaagactcgttctttatataataacattgtttgttgagctagcataaatggaaggtcctcagctatagctgttattatgtgcttactggccagacaaacagtgtgctttctgctgcttctttgttaaggaaatgagatgcaaagggtcgcgcacacaatactccagtgcagaggcggtaggtggtgtccctctactctgccctgggagaccgaagtgaactcatgtgtgtttggtcttagaaaactggactccggcccctgacagctcagcctcctgcaatgtttcaccatcaggatgagatgattttctgcaatccccgaatttgtagcatagtatgctgtacagtttacacagaggttaaagctgacggctggatgcttcattttttttttttttaactcttgctgggggcagcacctgtttctgcatcacttacgtagacaccttgcaaggaaggatgatgaggggttgcccatgggacatgctgtggggcgtctgaattttatgagtataatgctgtgtgtgttgccacattcaaaacagaaatgtgttatataagggtctctggctaaatcacccaataaacagattatagcagaaaaaaaaaaaaagaaccctatggcatatgtcagtatagcagtatgcatcataactgctgtccgtgaaagatagctacccttgggtctcagaaggcttcccattttcccttgctgcctgtgttagctgtaactctaactcttctcctgcaaactcgttctgtgttccacccagcgtgcttcaagtgaccagactgtcaattctttgcaaggggccatagttgtgctgttggggcttgaagtcacgaaggcctactctggcaggtagggttgagggatggaagagactctaggagttcagtcaagcagctattcacagctgggctcttcaggaggcctgactatcttcttacactctgtctccctccacactcagttatgaaacgtctgatccctcgttgagttgtaagttttatttctgaccatgatttttaaacttgggaagtcagtgttgctttgaagtggatcggagtttgttgtcgctctttccagaaacgcttttagaagccagctgccgcaagcagcggagtcgcctaggaactaatgtgagcagagtcgcctaggaactaatgtgagcagccccttcttctctagaactgtgtaaatttcagatgcaccaggtcagaggggaagcattctaagtacagaaacatttgtctttccttttggtccagcctctcaggacagcaggttttcctgtagggtgggatatgaagagtgtcctggcctgacttaccggttagagccgatggcgggtagggttaggtactgcagtggtgcgttcctagtgactcagtggtggctagcaggctgagctcctggggccgtgtacatccacagaggtgggcagaagtgaggagcgatttggggtgggatggggaccatggtacataaagcagaggggaagacggagatgttcggagggctgacctgaccctgaatgctcattcgagtttatttgtttttataaggaagaataatgtgatgtgttacccgagatggtgtgaacagagcttcaagccaatggagacgactaggcctaaatagctgagccggtggagtgccagataaagccacacctggagtgccacatccccagccgtctctctcagtgccaatgcattgatggctgtaagtgtggggtttgcccagatcgaagccgagctcttggagtaggtctgctggataggtgtgtggagaggcttcactgaggcgaccagctgcaacccgaggatagacaggcactaagagctgagaacggcgtgttctctgggtggggggctggggagcccctacggcactgtgctactactgcagagcttgtggggtgcatggagctcagcgtatcagacatgctactagtcagtctgtccacgcagtgagactataacaggtcatcttgcctacagacagatgttttacgctaagaataaagtcttgatatacactgtcagcatgtcttggctccatggtctaagagagatttaggcactgtggtggggtattttgttgttgttgttgttgttcatttgtttttttgtttgtttttgtttttgagtctgacccacagatagatataaatatagatgttatccttgtagggccctagtttgaaacctgaagcctgtagcctctgtctctcactacacatgtaagaaagggcaaagaagcttgccagaatggtttagtaaacacgtatcatatttttaagtcctgaggagtctgtttggacaggtctgttaacttctgttttggttaccagacaagtagcaaaggaccaggaccatctctaagtataagaaaatacaaaaaggtcactcagtggcccccagccaggcctttctttcatcagcgtaggggagttcacatagactgctacattacttcacacttttgttttttactgaagatgaaaaccagggacttgtgcattctaggcatgggctctaacactgagctacgtccacagcccacattactttgtgagtcaccttaacacagataatgcagtatgcacctaagatgtgtctatgccgatcctgggccacttacaatgggtcgtgtacacaggctgccattggcttctgtgtaagtgttacccagcactctatgtttactgctccagtatatcttaatacaggtcctggtggcttattatacaaataatacactttttgtttgttttttaaagagaaatgaataaggagagttgaaaagcagaaaaagttgcccgagacccactactctccgatagtcaatgcttattataacatgctgcttttggccgtcatgacatatatatccttgcaaatagattgttttcagcctgctgctgtgtgttacatgctggtctgttaagtgttgtcctcacctgactaaagatcaagcacactaacactgacaccggcctgtgcagagagtgctcggcacagccatatagaattccgaatgacctaaaagaaatttagatgctcagagtattttgcaaagtgaagccagggctaaccatacatactagttggttccattttccccagctcttccatttccaaatgcccaaattttaaagcattgaaagagagaaacttggtcattttccaagagaaaaatgatcgggtcttaattcaaagcacttattacccaggaaaatacagtctttaaatattgaaagaaaacataaagtggttatcaataccattagagatagtgatgagagataaagggagagaaaattgtaccaattataatgtatatgttttgtttgaatgcatgcgtttaaatgtctatgtactgcatactattctaagaataactatatattaatttttgaagatatttgttttcaataagctgtataactatgtgtgtctaaacatctgtgcatccacatgtgcatatgtactgtgcagtctcatacatcacacacattcctatgtagatatgcttcatgctctgttaactgatggtttatactaagcggcagatttctagcacagaagtttggagaaggaaaattattattaactgccgtggatgtgaacaaagctacccaagagggttgaaaagccacactcgacaacagagtgaaggaattccattttaaagttgttctatgcgaagatatgtccttgcgcttcttaacgaggaagataaacttcaaacggaggggtgatgtgtttaagggcctccagaaaaatgtcctagagatacttaggtttggatttctcttggaagcaggcagaccaaggcctttatgcttctggggcagagagtcttgactgtccatttctagagtatgaaaactggtctgtaaccgagtctgaagatggggttttggcatctgtggctagtgaagtaaatcaagtgcttatggtttgtatgagagatctcacggagacatgtaggtgttttacttagctgagctattgtggtaataagccagggtctgagaagtaaatgatgtacatacccttccttcaatcaaattcctataaattctaaaatatgtataggaatgctttccatactgaattatgatgatgctaagagagaaattccttaaatttgaccagaggccatgaatttgcccctcctgctacttccctgtttgttttccattttggggtgatagatagatgagagcgtgactctcagtcatcccatcagctctgcccaggtgcttctgtgttctctcctgacagcttttctcctctttagactacagtggctcacggtaagctatttttgccttgaatgactcaagtgctcctgggaagaactcaaggggtttatcttggctcacggtttcagagggttcttggcctcatgtgtttgggtagaacgtcactgtggcagcagtgcatggcagaggaacatcttcatctcatgctagataagaggcagagaaaaaggaagacaggaagggcccagggtatggtttctgtgatctacttccttcaactaggtctaaattccttcctcttaccacttcttgataataccattatattattaatccatggggacaaggctccattagttagacaagagtcctcagaatccagccacttcctgaaagtccatcttctggcaaagaagccttttgagggatcttgttcacagtgtagcatgactgagtccagagttttataataccatgactccagttgtatgacctcagtaaatgccacatcactctgtggaacttagatctgtgcgacactcagtagaaagtcagcagtgactatgtaaacccatcataaggtgaagggcccacaggtttccctctgcctctgtctttcttttccaatgaccttcgtactgggtcaatagtcattgtcattctgttctccatctcttctttaacatcgcttctctgggtaagcaactggaagggaaatagagaataaaactacactggttatcattttccatctcgtcttgcctctcccatttgtcctttcaaacaatagtcatatcatatatcataatctcactcaggtatcagtggacttaagttgaagattagacccagcaaactctacagagctatatccttaaaaaccaggcagactttaatgcttttagcatgtttgtaccagccacaggagctgtgaaaacaacaattttagtagccaccttacaatgaactctttttgcttgagaattttttatgcaaccctgggtatataaatccacaaaaatagatacccaatttaagaacttaactgataataaatcataaatgtattttcaaacagttgttttgggctggcaaaatggctcagcaggtaaaaatgcttggtgtacaagcctaatgatctaaattcaatcttcataaaccagataatggtggactgagagaaaaggtcccacaaagttgtcctatgccggcccccatatgtccacacatacataattatgcatatgtgataaaaatgcagaatgtcttaaagcaattcctttgctatacatataatttcaccatctattaaagacaaaatcaaatttgtatactcattaaatgaatatacttgtttattctttaatttttttcagttcctgtcttttgttaaccattacctgttttctggtttgttgaagtagttaagtcagacaacacttgccacaagtgctgtctgtcaaagtgactgacaatgaaatctccagtactacatttatccgaaggacactctcgacaaaggcaactaattttgcatttttaatccaccttacagtatttcagcacagcaaacccagcctttcttctgtgcttattcttcttgggaaagaaaaacttctcccttttctcagcaacaccatgaagtctcaacacaggatgaggggtggagtcactatgaatgctaaggttggacaaagtagggcatcatccaactgcttactagcagggaacagcctttgctgatcagaagttaattccctccttaacctggatcttaggttttacattttctgtagcatctgagggtttagcctcaagggagattacctgtcttttccataagggtctttatgataaactgcatgctggtatcagtttctgctgtttacttttatataaagaactaagctgggcatgatagcacatgcctttaatctcagcattctggatgtagaggcaagtgaatctctgtgagttcaagaccagctctgtctatatagtaagttccaggacagccagggctacatagaaagatgccttttcaaataaaccaacaagcaaacaaacaagggaagagagagagagagagagagagagagagagagagagagagaagaaagaagaaagaaagaagaaagaaagaagaaaacagaaagaaagaaagaaagaaagaaagaaagaaagaaagaaaagaaaagaaagaaagaaagggagnnnnnnnnnnnnnnnnnnnnatttatgaaattcctagccaaatgggatggacctgggaggcatcatcctgaagtgaggtaacacattcacaaaggaactcacacaatatatactcactgataagtggatattagcccaaaacctaggatacccaagatataagatacaatttcctaaacacataaaactcaagaaaaatgaagactgagagtgtggacactatgcccctccttagaagtgggaacaaaacacccttggaaggagttacagagacaaagtttggagctgagatgaaaggatggaccatgtagagactgccatatccagggatccaccccataatcagcatccaaacgctgacaccattgcatacactagcaagattttatcaaaaggacccagatgtagctgtctcttgtgagactatgctggggcctagcaaacacagaagtggatgctcatagtcagctaatggatggatcacagggctcccaatggaggagctagagaaagtacccaaggagctaaaggaatctgcaaccctataggtggaacaacattatgaactaaccagtaccatggagctcttgggggagtgggtgggtaggggagtgggggtgggtggctatgggggacttttggtatagcattggaaatgtaaatgagctaaataccttataaaaaatggaaaagaaaaaaatatcactggtaaaaattatattataaaatattacatctctttaaatattaaaatattgataaatggagcatccctggagtagtactggatattcttggatttctgatatttacttggagttatgatttaatcatagtgaagaaacacaatgtttattttccagacaagttggacattagagtccccaagactggaaaacaaaccgactctttaaattgttgaatttagaaagcaaacaagagccagaggggtcaaagacaccagaacacagaatctgctaagcagtgcttgtagggaatcacagagactgaagccacaatcacagagcctgcatgggtctgcactaggaccttagcgtgagtgttgtggttgttaacttgatgtttgtttgtttgcttgcttgtttgtttgtttgtttgtttttgtaggactcttaacagtgggagtcaggctgtctctgactgtttcacctactattaggaccacattgctcctactgggttaccttatgcagtctctatatgaggatttgtgcctagtcatattgtaaattgttatgttgtattcagttgacatcactgggaggtctattcttctctgaaggatggggagaggagctacaaggggaaggaagctaactgggaggagttggggaaagggaaactgcagtcaggatgtaatttgtgaaagaagaataaataaaaacttagacttgagaaaacagaaagaaagaaagaaagaaagaaagaaagaaagaaagaaagaaagaaagaaagaaagggagaaagaaagaaagaaagaaagaaagaaagaaagaaagaaagagagaaagaaagggagaaagaaagaaagaaagaaagaaagaaagaaagaaagaaagaaagggagagggaaggaaagaaggaaaggaaggaaggaaggaaggaaggaaggaaggaaggaaggaaggaaggaaggaaggaaggaagaatccttttttcatgcagagatggctcagtggttgaaagcattggctgctcttccagaggacctgggtttgattcagcactcacatggtagctcatgtctgtctctgactccagttctagggaaatctaacactctcttatggcctttgcaggtatcaggtactcacgtggtacagagacatacatgcaagcaaaacacccctacacataaaacaatgtacaaaacagttaaatcttaggggaatacacaaaggcacagtacaaaatgccagaagtatatttaggaccatttcagaagttcttggaaatcccaagacaaaaatctatgtgaaaaattttaaatgaaactcattagcaacttcacacagcaattacaaaattaaagcattctagcactatgctactgatcgaaaacttccatgctgaggaataatagaaaaattctcaaagtctggtttctgtaattagaccattattctctcattggagggggtgactgttaaaacttgcaagttctagcctgcagtcgtttggaattcgtgctgaggtgtttcaggtaggttcattggcattgagtggtaggagatgctgggttcgaggccacagtcaagttgcatcaggcaaaggggagtgtgctgccagaagcatcacccatcattacatgttagatcctgaaacctttggttatgtgtattcagaaacttgtgccaggtatttttttgtttttgtttttgtttttttttgtgatagcccagccttacactggattgtaacccatagctgccaaatgtgccttacacatagaagacagaaccccagagaccacagctgaatgggcagacccaagagagtttacacttcgtataaaataatgacagcagatagggagttgtagatgtttatagcctgggctttgaaccatttaagttgttggagaaagtgaggctgaggaaaatctcagctgttgtttttacagcacatattggtttatagaaagaaagtagcctagaccactgtcggccatttatgagtgctaagtctagaacttgctctcactctgtattttcttgtctttgaatatcagtgtgcagtattagttgttggcttagatacttaaccactgtcagtatttcacatgtcctgtgttttgtctgatttttttttatctgttgtagaagtattcaaaaaggttcacacttaaagcaggatgttttgaatgggtttagagctcctgcatgtaattccaggtctcagaaggctgacacaaagaattcatgtgtgttcaaggcaagtttctgcttggttaagaacaaaacaaagtaactaaaacaaatggaaacctaactaaaacaaatggaaacattttggattttctcttgcactcatgagaaccgaaatgaacccgatgtgactatagactatcggcaaccctggtcaggagcctgtggtgtggactctgattttgcttttgcctcttacatctaactctcacctttcctttttgcttgagcatcatttggaaaaagctttgatcttcagtgtcaccgctctggttactgttgttgagcttttgatgaatgataggactgtagtttaaagtgtttcttagagccgcctttaatcccaacactcgggaggcagaggcaggcggatttctgagttcgaggccagcctggtctacaaagtgagttccaggtcagccagggctacacagagaaaccctgtctcaaaaaaccaaaaaaaaaaagtgtttctcagaatttttaagtctttgtaaaacttaattcctttttttatttttatactgaacatgggtatcaactatgaaaatgtaaagttttctttttaattttttgctttacaacataagatagtaatgcagtctaataattcagtgactgagggaggagcctcagttctagtctggtattgagtctagctccccagttcttagcagtggcctgagtacagttctttctcatttttcttatttttaaaaagattttatttatttaattatatatatgatgagtacactgtagctatcttcagacacaccagaagagggcatctgatcatattatagatggttgtgagccaccatgtggttgctgggaattgaactcaggacctctggaagggcagtcagtgcttttaaccactgagccatctctccagcccccttttcttattttttaaatatgctatagtttgattatattcccccttcccagactcattccagattctctgtacctctctatccatctaacttcatggtctttctctctctctcaaaacaggaaaatccaaataaacaaaatataataaaacaaattatacaaaacataacaaaacacacacacacatgctcacaggcatacacacatccatacacacatgcacacacatatatagcacgccttggtcaagatggccaagcacttctggggtctgcccagaagtgtggccagttcacccagtgacactccactaaaaagaaaactttccccccactttccctgcaaataccaatggaagatagcatcttaaccaagaaccacaggggaccctgtgttcacttccccttctccatgctgggactttgtctgacatgaacctgtgtaggtcttgtgcatgctgccacttgctttgtgagttcatacgcgtatcagagcagttatgtctggaagattctgtttccttggagtcaaccacacctctggctcttatagtcttcctgccttctttccaaatggctctctgggtccttgggggaggggaggttgataaaggcaagtctgggtatgtcccttaagcttttttgccttgattttcttgtctctgtagcataaacaataatgaaactgatatcttggtggtaacaaaaattgttatttagtatatatatttaatatatatgtagcccttcaaatgaatatctatacatatatatatgtgtgtgtgtatatatatatatatatatatatatatatatatatatatatgaactaagtatgccccttgcaacacaagttcctactaagaacttaggtttatttcaagtgctcttgaataatgtttttacagtgattcacccaaaatcctatagaatatatttactcctatgtctccatgtccatgtgtatgtccccaccaaatgtcacattccgtgccaagtgttctgtataaagttagcagtaacacagaagcatatgcagggtgataatagaaacagacaggtaaaagtcactgctcttctgagatcttacagttaacttgagtcttgttttggaaaaggagatgatagagtatccttgagagaatatccatcagggtttggaagtcttggccttggcctattattagcggcgactttggacaggcacctttatcttcctagtcctcaattttttttttttttggataaaatgaagtttgattagatagtttctaagatgtttttctgcgtctagaattatgttctgtttgtggttgagcatgtcttcctttgggaaacaaatgccgccgtgtgccatttgctttctgaaatgatcaatcaccatggcgttgtgtacacaccgcgtaaggtgtcagtgtgtgggccttaaatctgcatatttggcttctctcaggatctttaaaagaagcaagtgtgtgtgggacatgtgtagggaaagactgcactttctgaaagcaaatgttttatgtaagactttaactccagattccaacaaagatgctttgtctattgctcgttttctttcctttcctgtatcatacttccggcctgcagcagcctgagctggcaacgtgtgagtgtcagacctggaactacgcgctgaatcatctttcctaccaacaaaggtgtctaatctgtacattatgagtgtaggcatacacgatatttagaatattaaaataactattttgtgattgacatgactcttagcatcaataatatataatatatataagtattagctgtatatatatgtatatatatgtatatatatatgtgtgtgtatatatatatatatatatatatatatatataatttttagaaacttttgagttagggaattgaactcaggacgtctggaagagcacccagtgcttttaaccgctgatacacacacacacacacacacacacacacacacacacacacacacatatatatatacatatatatatatacatatatatatatacatatatatatatatatatatacacatatacatatatatatacacatatatgtgtatatatgtatatatatgtgtgtatatatgtatacatatgtatatatgtatatgcacacaaacatacatacacacacacatatatatatataatttttagaaacttttgagttaatcctttaatccttgtgctgagattataagtatgcacaaccattatctaagaatattttcaaatgtttttttcatttgtaaaaactttttgctctgttcatcattattgttattgtttgagatattctaagaccaataatcaactaaatacaggaccgcagaaatgttgtaagttctaggagacatttattctttttaagaatcagttactccttttagaagtaactgtacccaaaggtcataaaaatgcaagtgtaattcctgacttgggctcagtccctcaaatattcccttaaatcatgattgaataaagtaagaattggagcaaatattaatcacctattataggaaaatatggtgagtgttgtgttaaagtagtgagtgagtaagcattttggtccattagtcttgccaaagactcattattgatagcttgatgacatccggtttcaaatgatgcctcagagattaatgtcttagtacctatttgattcagtggctctattgattcaagtgatgggattaagaacgtatttttcacattttcaaacaatctggctacagtattgggattaggacgaagttgacaaggtcagacgacacaggacattttagtcatcatgatgtacagggtgctttgtgaagtgctggaagattgcaaagtagtgtacaggaatacaggactgcagctgcacaggccaaagcgactttgcatgtgtcaggttttacaagagaattcctctgatcgtcaactgaaagcatagttacataagccacaatgcatattcttttataacacgatgagtttttatttacatgtctatctgtgtgccttcaggaatttatgtgtaccatatgtttgcaggtgtctgaggaggccagaaggtgtcatataccttggaactgaagttccaagcggctgggaactatctagtgtgggtgctgggaaccaaacctgagtcctctactctacaagagcggcaatggttttaactacagaaccatcactccaggcccataatgcatattttttaaaagaagcacttatttattttatgtatatgagtacactgtgactctctgtagacaccagaagagggtatcagattccataacaaatggttgtgagccaccatgtggttgctgggaattgaactctggacctctggaagagcagtcagtgttctaaactactgagccatctctccagcctccattatgtatatttttttagagttccagtggtaaatctcttctcagattttaacatttatgaagaatacactgtattttattaattcttatacgtattttttcacatttaacatatctaagggccatgtcttcaaactaatgatacctcatagttttattggcagtgggttttttttttgttgttgttgttgttttgggtttttttttttttgagacagggtttctctgtatagccctggctgtcctggaactcactttgtagaccaggctggcctcgaactcagaaatctgcctgcctctgcctcccgagtgctgggattaaaggtgtgcgccaccacacccagcaccggcagtgtttttaactactgctgtgcataatctaatagtgaatcttaaaatacaccttcagttcagtgaaatgaaatattttgggaagagataaataatatgaaacgggcagtgggaacaataactctgagaaccttcccgcctcttccctccttactggccatgatcattaattcactagggttttcattcaaccgtcctccaggaaggtgctcttcagtccttttcctaatacactgacaggcatgggaatttaaaaaaaatactcaagtatatacacgtcttacacacataattaaaaaaatacaaataatatcaaaataaatgttatcctattaggacacctaaaaaaatataccacagatattttgtatgccagttggctctttgttgtaacctgggtgacatactggctgtagtgtggttgtgtcatggtggaaaatccagttctttttgttactatcataaagcaccgtttatggaatgaagagtttatcttggcttacagttccagagggagcgtccacagccagggagctggaggcagaggtcagatgaggaagctgagagatcacatttctatctgtacacaggaaacagagagaacaagctggaagcaggaggaggctgtgaattttccaagcctgctcccaccaccccttccccagtggtgtacttcctagaggttccctaaccttcccatacagtgctgcaaaccagggaccaagtattcaaccatgggggcctatgggggacgcttcttatccaaattcctacaaccactgatgaagatttagaagagttttcattcaaccactctgcagagttttaacaactttttctgtgaatatttatgtatacagggaaacatttctccaaagcatttatatagatagagttgctagataaaatgattagcaaaatttaagatttatttatatttgtgagtattataaaatggtcttatatttaaataaattctttactgcttgagagaaacactgaattagctcaaagcattcagtctaaaatataaaactgtgagacatttcttgactacagaaagcagcttttcctgggctttgtttctgagagcataggaaggattcccctactctactgtaataatttgttgctagtttttcaacaaaaattgtaaaaaatgcaccaaccctcagcttcatctttgtagttaaaaaatcccaagacccagagaggctagacacctttctcagaacggcatgatatatgtttcaactgtagctagaattttccttgcgtatctttctagggcaatattcgtttatgcgatgccaaattctgagggccagtaatatttaaacacccagacaactccccaaaggtggctgcatcatatatttatatgatgtttgacagcggatttcctgaacagggaacatattgctctcagacacaatattagacctttatttgcttagagatcaaatttgctacccagtgtctttcaaggttttttttgttttttttttttttttttgtgatgttggtctgtaaagaagtttgaagtaccgaggtgatgatggattaaaatgataatatctccataaaacataagtgaaataaaatctccgtgctggagaacattggaaagaggtttgggggcttagggaaatactcaagttcttataatttgtgtgcaggtcgagttgagagttgtaagttggtactacagttggccttagctgagaggattcaagatctattttgttctctgtctttatcatttgcaattcatgtccgtgagctccaattcaagaaaacacttgcatgattcagtagcaatatttttaaaaggcaagtggacattgatatttgtcaaaggcacagggaatttcaaattcggtgactctactaaaaggaaaaaaaaaatagcatgcccaaattagaataacttgaaagggtttaatgaagtgtaaagatgtcagtcgcatataaggaaactctaggagatcatgctggcaacccacagtggtcactactcctagacccaacagcaggcagaagaccctgaaagaactgagttttatccagaaagctactcagggaagaacatagttttctctgttaaaggtatcaaccctgcaggtacctgcctctgagcattccccagagaggaagtcagaaatgggtgctactctttcttgaactctggtttctgttggtcaaagtactggaggccacacagcagagattgtaggtcagctatactgggtaagagcaggctggagaagagtaaggaggtgacgtggagaggcaagatgaaggtgttttgtctgaatatatattcaaatgagtagatgaaagcacacagtttgaaagcactcccaaaacacacttctgaagatgtgactgaagctaggaaggagttggtgctggtaattttccattaacaagtgttttaggtttcattatgtggacatagttttccctacagatagtttatctgagtctcaattcttatgctaatgaggacttggggtggtgggtgggtgggacctagcaatagggaaaaactaaagctttgtgagtaaacttgagaagtgaagcttagaggggcttatggtttgggtgaagcccctgggaagtgcttagggttaaacgagatcaggtcttgagggattggctgcaagcaaggcctccgaggctatctaagtggacaggagacctgagctagcactggattctcgccaggtggtgtgatttgtgatgtgaggcggtagatgcttgatgtggactcacatcttcagaattcccagcttcagactctgacttgatcacacatcttctttatgaattccctagtatgtggcgttctgttattctagtggaaaacacattagccttgcctttaatacacagaggtctccaaagataatgaaaggacacagaaaagcacacaggaacctgagttgggtcccttaggaccgccccctcccctcaaatgtctttgttcagtcattgagaggctttgtaagtgcagggttagactgtgagcatctgcagaactggcaacagtattcttttctttttttttttttaattttattttttttccattttttattaagtatttagctcatttacatttccaatgctataccaaaagtcccccatacccacccacccccactcccctacccacccactccccctttttggccctggcgttcccctgtactggggcatataaagtttgcaagtccaatgggcctctctttccagtgatggccgactaggccatcttttgatacatattcttttaaagagaggtgatgaccaaggagggtgggaatagagaggcaacaatttcctttagcgttgagagcagaacttgagtggaaaccatcagaagatcatgggaaatactcagaggccaggccttgccactttaagcaaagccataccgatcctgtatgtgtctgttccagaatctattctgataggtagttgcttacatagcaggctaaaccatgaagttccatgaagctgcacacacatggcttgaacatatttctgagcctgtattattctctaactggaagttttaggagttccattttgttttcttttgttttgtttttcaagtaaaaaagttaaactagtgctattcagggaggttggtttaggagacagagagctataacagaccttttgttcctcattgctaggagggagtagacccttacattgctcgggtgcttactcttccattgatgaggagtccagagtgcagaaagagctctggccctggacaggtagattagctggcctaggaaagagatgtatggcccatctgtgcctgaagcagaaggtggtgtccttggtgatgctcatcagagctgttccccaggggacagatcgctgtggcagtggccatgtgcccacatcagatgtacctcatctcttcacatagacacaatttttaggtaaagaggactccaagtagacttttctgctggtcttagcagtttctgtgggtcagagccaggtggttctcagtggggaaagctggccctcgtgctatgagaactctgctgctggccacagcaaagagtctgttccagagatacggagccaaatggttgttaagtatctccattgagaatcatttcggtaagattttaatgttcagatgtttactcctgtatgtgtgtttggtctgtgggtggagacacttgacagagaagtagcaatcaagtctctaaatatctgtaagggggactgaagacttggctcagcatgtatgagtactgctacgcttgtagaggactcagacttggttcccagcacctgtgtagtggcttatgactacctctaactaagttccagggcatctgactctctcttctgtcttccttaggctgctgtgcacacatgatgcacaaactcacacaggtacatataaaataaataattaaatatgtatggaggtgtcttaaagctaagccagcttcacatattatcagaacattgcttgaatagtttcatcttcaaaatttacatacttataaagtaataattattttttcttttttaaatttgttttttgaggttagcctacaaagtaatggtcttttcacacatatctatgtacccttaaataattttatttttaattctgtgtgtgcatttgtgtgaatgcacataagtgccggtgcttggagaggcatcctatcccctggaactgggattataagtatctgtgagctgcctgactcgggtgctgggaactgaacttcagtaagctcagtgtgcaagtacgcccttaatggctgcaccatctcacttcagtgctgttatatactatttgttaaaggttggtcctttcccctctctcttctgtcccatctctgagacagggtttcaccacatagtccttgccggcctagaacttgttatgtggaaaaggtcatcctcaaactattaaagtctgcttgcccctgccttctagacctgggattaaaggcacgggccaccacatcggttcaaagttgatttctcatgctacttttggagctttaattttgaagttattacgagtgcagagcatagtgttataatgagggtgatgcagaccttgttgcactactgtgttttaagttgtgcgtgcatctaacttcttgtgtcagagctacagcataatgtgcagtgtattttaactcttggaattttattaggattgaggaatacattgataaacacacgggtttactccggatttaaataatatgcaggaatacatgtagcttaaatgcatttgctcatacctactttgcacggattctccttaaaacatgaagaggagcagagaggaaggatagagagggggagggagattcaaatgaggcaggaagaggacagggaaatgcatagcctagattttgtgagtgttttgattcacatcccttccactaaaacatattctggctgcaagatgtgcagctcatggctcagttttccctctgagtattgcatttgcatcgagaagctggctttccaaatgccagccagcagctcactcaaggatggaggctgagtctgacttagcaactggattacagcgatggcccgaggaagctgtggagagggcacatcgggcacctcgttctagaagccccacaagaattttgccagctgtggttaatctgactttcaagtgtatatgaattttcagttcctaaaagcttgcaaagatgtcctaagcaagaagccccgcccctgcatattaaatggatgacatctgagtgtccagattgctttcctgcagttggtgagactattcagcaggctctggctgtaatgatgtcatttcttcacaggcattaaaaaaaaaaaagttatcttttaaacaagagtaaatgttatatgacctctgaggttccccagacaagaggatcagtggacaatagaactgtttcttcttcggtcttcttctctcactgtagcagaatgcatagataatcagcaggctctttgaaaagggttattttgagttacaggtttagatagtccagtctatggtctggtccagtctatgatctggcccagtctatggtctggtccagtcgatgatctggtccagtctatgatctgatccagtctatggtctggtccagtcgatgatctagcagactcattgcttagctgttgatagaggtggccatgatggggaacaggtgatagagatactgttcacctcacaggcaggaagcaaagaaggagggagatttgagggcatgctccagatgacgtaaggtcctctcacaagatgtcccacgcccctctagtagcagcaccttaggtccagccttttaacacatgggctttagagagtgagaactcaacagtcaaaatgtaccagccacgagtgactggaatttcctatcgtcttgaggatagggtagtactggtagatggtttccttcatctacagataagtaatcttcatcttcatctacgattaagtgacagccagtgctggtgaaaatgtggagggaggaactctttccactggtgggaaggtaaactagtgcagtcgttatggagatgatacagagattcttcaaaagccaaaaatagatttaccgtatggtcttactaatttagtatatatttcaaggaaattaattcagcataccacagagatacctgtccataggcatgtttatgatggcactattcacaaaagctaagatgaagtcagtgtaggtgcccatccacagagcagtgaattaaaaaaaaatgtggcatgtacacacagttgagtattatccaggcacaaagaagaatgaagtcccagcatttgcagtaaaatggacggaactctgtaggacattattttattgtattattatgcattacaagttagactcagagagacaagcaatatgtactctttctcatgagtagatgctagtgtagccgtcaaagtgtggtcagtaaaggataaaagtggagttgaggggacagagaggttggtgattagcagatgctctgtgcatgagtgagaaggttgcactgaactccaatgttcacaacagtcttcataggaaaccactcagcctctggtttgaaaagggccccacccccttttaaagaagatgaagactatgttggattttaccacgaaagcagcagggctttcaacatgcagtgtttgaggagagcagtgggatcccatacccacttctcagcttcaggggtttattttcctccacaatttttttggcccacttgagggacaacctgaagccaagcacattccgctattcctctgccaattttccagcttggtttccagttcctgcttcataagcaggtcaggtgagcggttgccactggactcctgcagcctcttgagcaagcctggacaccaaagtcggttgtgtttcctcttttccattcagttcttcaaaattgtaggctcctacctatcaacaaaacctggagttatgcccattcatgctcccacttcctcctggctcttgggtctttctgagcaaaggagtctactctcctcctgaatcacctcctgacctcagataatttttcatttaggagtgcatctagctgcactgtgtctgcaagggataaccctgctttcagagaatccgaagccgcctttagattcctacccttgttaataaaagaatttaaaaacagactgagaagctaagcacaatttattgaagtgcgagagagcaagagggcaggcaaggtgtaaatcttgacagcagccttaaggcaaagggtggagacgagaaagcaaaaccaggccttttaatgccagcgtctgagacagccaacacgctctgcaatggagtttggcaagcacctttatggcagaagtggagtggcttaaatgtccagagaattcagcgagaaggctcgggcagtcagggaaagcttacccaggctttagccagtttccaaaagaaagagctagaaagaaggaaaggcaggatgtgccatagtgccctctgcgagccgctgccagccaccacgagctggttttggtggaccacacaacactctcccactgaacatactttgggagaagttagtggcaataggcgattgggggaaattgagagatttatttgtttgttttattttattaacagccttggagcttgaacctagagcttcatgcattgtggcaggtgtgctacagctccagccttgtgaggccgggcagtgggatgagtttctgtgcattgagaggacagaaggaggggctcaggcaaagaggcctgttagaaagccgtggaaagaacctgggtaaaagagaatggagctgagctaggcccgagtgaggtggaaacagaggaagaagtgatacgggacccgtgtgggatgtcagttcatctggctggtggcccattggcttagaaagggagaggtactctgtgtttggcttaagtgactgatggatagtcttgctgatgaggctgggatgttggccatctcttttgatgtcttctggacggatccagtgagtgctggtcaggagccaggccaactcttgaggctgcagctctccagctgttgatcttgactcctggctaagaaaggtactgattccaccaaggccctgtgcaaccaggtacttgcttaaggataatgctgttcaggtatatagtttctgggccctacccctatcttcatataccctattgtgcaatatttagaaactattgagggtacttgtcacatgttcttatgttgtatattttcctgttggataacatttacccagagtctctcccacctcttaattttcatagatgaatttctactcattatctgtgaatgtccgctgatacatgtaaaaagaaaaaatgagtgcccagccatgaaaccttggtgatcactatattactctttgtctctttcttaaaacagtagacagcaaaccataatagtagtataatctcaagatcaccatttgtcaagaaatatgtcttgaagaactcaacataatgcagttggggaaattctggggtgatggggttccttaaccagaaccatatgtttgctgcaagttatcttagagtctttaatgggttcattctcaggactttggttcagttagtcaaggtgacttaggactagtaaacctggcagatactaaagggtggtggagagattctgggtcatgttattgagcgcttctacaaagagcttccttctctctcgggtgcctgtgtgtggtcacatttggagcagtgaacagttgggaagcaggaatgtctgtcttactcgtctccctttccttgtatagctttgcaagcactgtatgctcgtactgagacaggcattcaataagtggttgctagaatgaatggaaattcaataactttaattcctctaggaatcaagaggaatctagggaaatgcttagaaatgatttcatgttatatggttgtcagggattcccaagggacactcattcatccttggccacctattttctcttctcttctcttctcttctcttctcttatcttctcttctcttctcttttnnnnnnnnnnnnnnnnnnnnnnctcccctcccctcccctcccccctctttctttctttctttctttctttctttctttctttctttctttctttctttcaaagaaagccaagcaagagttggagagatggcttggtgggttaaggtaaatgccactatgactgatcatccaagttcagtcctggaacacaaaaggagagtggcaaaaggagagtgctaacccctacaagttgggttctgttctttggtgtgcacatatccatgtgtgcacacaccaaataaattatgattttataaaagaaagagaaaatttttaaatgagggattacaggttttagggaactaaatggtcagtatttaaaaaaatgcagtgtgatgtatttccagttggactgtcatgattgaaatccactttgtgacaatttaaatctccttcctatacacactctggagttaacttcctctctggggggccaccatttctagcaagttggtttggaatatcagctttgctgcatataattcacacagtacacaccactgacaggatgtaattcggtgagtttattacatccagatttgttcaacaatcactgcaatcaattttagactattttaatagtcttgaaagagaattcatctctgttagcagacacttgctgtttctccagtttctatcctaggctgcctctggccagacgttctagacgtttcctgcattttgtgatgcactgggtttgttcttctgagactgatgttttcactttgcatggtcttcttgtggcaacatatatgagcattgaatttcttttgctgctaaatagtatctcatggtgtgcatgttttatttcttgatagatggacatttgggtgttcgctttccccaaacactcaaggataaagagatgactaaggaggatatgttgtcttttgtggaagcacatggtagtaggatatcctaaagaagtggaagcaagaatataatgggtcggagactatactttggataggtgaaatggttcagtggataaaggtgcttgctatacaagcctagagacccaagctcaatcctgagaagtcacagaaagatagaaagccttcactccacacagttgtcttctgacctccacccatgtaaggtggtgcacatccctacacacatatcatgcccacacacaataatacataaataaattagttgattaaaaacaaagacacatagcacaatgatatgcaacaaaaatgttgaatgagggaaagaaaagtacagccctgtgatgttggtgtttttgtgcgtagggacatgagactgctttacaccgccctgagagtaaatggcataaatcatcctagaccaggtccagctctgacactgcgaagggcgtactcgaggagattagcgactggtcacagagaagattggaagatattttgtttgggagtaatgctgtcggtgcagtaatattcttgtttcttcttatttgttctcatttgcaaggacattttcagggacattttcttgaaaatagaatctttgccacttccttggattgtaatttagcagctgtgttattatcagagctattatgtctgtgatggccataccggaaatctgtgactctctaaatgaggtcagttctctgaatgagctccatgcaaaccagccttctcgtgttcctctctgtaagccacatgagaacaaacagaaatgatgggaagtcagtcaggaacgtagactaatttgagacagacaaagatattttagttgtcatggtacttggcactgagattttttttttcatccatttctttgtaaaccttcttccccgccttcttcaaatctttcctgccagtaagggaattagtcaacccatcctagttcattttttataagctactcacaaatagtttatgtaaagaattctgcctaaatgagactgcactctaactctatggccttgagttttgcttgctgttgaaagaactggggactgtattggttcagagtgagggccctcaagggtcacccaggaagagtgcatagcaaggtgacattgtgatatcacttcagggccacatgtcggggctgtactggctggtttttgtgtcaacttgatactagctggagttagggcagagaaaggagcccaagttgaggaaatgcctccaatgagatccagctgtaaggcattttctcaattattgatcaatgggaggatccattgtgagtggtgccatccctgggctggcagtcctgacttctataagaaagcaggttgaggagccagaggaaatatcactccatggcctctgcatcagctgctgcctccaggttcctgccctgtgtgaattccagttctgacttcctttgtgatgaacagcagtgtggaagtgtaagccaagtcaacccgttcctctcctgcttgcttcttggtcataacattttgtgcagcaataaaaaccctgcctaaggggccttgcaaacacataagtggatgctcacagtcagctattggatggatcacagggcccccagtggaggagctagagaaagtatccaaggagctaaagagatctgcaaccctgtaggtgcaacaacattatgaactaaccagtaccctggagctcttgactctagctacatatgtatcaaaagatggcctagtaggccatcactggaaagagaggcccattggtcaggcaaactttatatgccccagtacaggggaacaccagggccaaaaaaatgagaatgggnnnnnnnnnnnnnnnnnnnnnnnnnnnnnnnnnnnnnnnnnnnnnnnnnnnnnnnnnnnnnnnnnnnnnnnnnnnnnnnnnnnnnnnnnnnnnnnnnnnnnnnnnnnnnnnnnnnnnnnnnnnnnnnnnnnnnnnnnnnnnnnnnnnnnnnnnnnnnnnnnnnnnnnnnnnnnnnnnnnnnnnnnnnnnnnnnnnnnnnnnnnnnnnnnnnnnnnnnnnnnnnnnnnnnnnnnnnnnnnnnnnnnnnnnnnnnnnnnnnnnnnnnnnnnnnnnnnnnnnnnnnnnnnnnnnnnnnnnnnnnnnnnnnnnnnnnnnnnnnnnnnnnnnnnnnnnnnnnnnnnnnnnnnnnnnnnnnnnnnnnnnnnnnnnnnnnnnnnnnnnnnnnnnnnnnnnnnnnnnnnnnnnnnnnnnnnnnnnnnnnnnnnnnnnnnnnnnnnnnnnnnnnnnnnnnnnnnnnnnnnnnnnnnnnnnnnnnnnnnnnnnnnnnnnnnnnnnnnnnnnnnnnnnnnnnnnnnnnnnnnnnnnnnnnnnnnnnnnnnnnnnnnnnnnnnnnnnnnnnnnnnnnnnnnnnnnnnnnnnnnnnnnnnnnnnnnnnnnnnnnnnnnnnnnnnnnnnnnnnnnnnnnnnnnnnnnnnnnnnnnnnnnnnnnnnnnnnnnnnnnnnnnnnnnnnnnnnnnnnnnnnnnnnnnnnnnnnnnnnnnnnnnnnnnnnnnnnnnnnnnnnnnnnnnnnnnnnnnnnnnnnnnnnnnnnnnnnnnnnnnnnnnnnnnnnnnnnnnnnnnnnnnnnnnnnnnnnnnnnnnnnnnnnnnnnnnnnnnnnnnnnnnnnnnnnnnnnnnnnnnnnnnnnnnnnnnnnnnnnnnnnnnnnnnnnnnnnnnnnnnnnnnnnnnnnnnnnnnnnnnnnnnnnnnnnnnnnatgctgtcgtgtgtgtgtgtgtgtgtgtgtgtgtgtgtgtgtgtgtgtgtgtgttttgggggtgcttccttctcactgggagagccctaggagccctttgctccccattgctgttgctggtggtgctatagcctcttagtgtgcatttcctgcattcaatcagcttcctccacctctgtcattcctaatcccttcagtttagtgcagaaaccatgcccctgatacctgggtacccatcttcccccactactcatccctttgtcctctttctccaccagttctgttacattttcatcttttctttgttcagcatcttgcctgtgaagtgttgagcaaagccagagcccatccctcaatcttctctcgctgacacctgtgcttcacccctcattccttatgccatgtctatattgggggatgtcaagtaaactatggcctttcatacgcctgacacccctgtgtcctgtaccccacagcagtctttttctggtgaaggaactggggcactcttgacattatagttcatgttcctgcctaatctcattctggggcagcctcttacagcttcacctatttattttactatgttaattctttgagtgtttttcatatatgcatatagtttatcttgatcacattgtcctccattccttctaactccatacaggccttccaatgttcatgcatgtgtaggtgtgcacatgcagatgtgtctgtggaaacttcatgatcaacagttcaaggtgagatttttatttggcaaactaatagcttctaggagggacattatcccctgtttatggtagctctatttaaactggtgtgtgtgtgtgtttgggaaattattcaaataataggtttctataagacttttcaaacatccttagtgttatttatttcccagaccccctcttctgccctggagtgacccagtaagtaacacattagctgatgctgaagtcttttcttttagagtctcttgagttctaaggtcaatgataaggaatttaaaatacacctaggcactgcttcatttcctctgtactctctgtctctcattctctgtctctccctgtctctgtgtctctgtctctctctgtgtgtgtatgtaggttagaagttgatgttgggtgtcttactctgtcactctttttttttcttctcttttctttctttctttttctttttctttttttttttttttttttttttttttttttttttttgaggcgggttctctcactgaacccggaactcaccaatttgcctagactgtctggcagttgatcttcagagattttcccttctctgccaccccactgctaaaatgacaggtgcacatcacatgcttagccttttacatacgtgacccaaacccaggatctcaagcttgcatggcaagtatgtgacctcctgagccatcttcttcattcctttccttttaattttttaaaaatagtatcatttctagggtggggaatatttggtgtttaagcccagaattcacagaactaggcaagcactatagcgttgggtttgctcctagctaaacaggacctgctttgcaatcatttgcattcagagctggatatgggaaacagttgggagcaagagaaagcccactgttaagggcctcgacagaggaactttccagaatgtgctttgtctctgtgcctgccttatatttgggactattccagagtggctcatgttgtagagaaacaatgactccaagagtcctatttctagttaccgtttttagataactgtcactgctgacggcttcctatgaactatgagttctagagttgactctatgctatttgggtggatcatggatggaagatgaatgttgtccaatctgattgactatttcatcacttactcttgagtgatatctacttagcaccagttatcaaataacctgaatgatgccctatactataaaaatactacacacacacacacacacacacacacacacacacacacatatgtaaatttaattttcataaggatggaaactgagtcatggacagcttctgattggtctgtggcagagctgatgctcagaaccaagcttgtaggcctttccagcatgtgctataactttctgcactctatgaagtccttctacagttcttcaaaacacccaattaacatgttgcagctttatttactagaagagggctttcagaaaaccaccttcttgaaatctggaggcgggaagcttcattagcttctgtgtgcagagcaccccagcctactcactggtttctcctattgggaagaagcaggacgtgcccagccactgagggcatttccaggctccattagctgaagcctgctgggcctgcctcggcaaaggtacgaaggctctttaccagaccccgcctttccaaaaccgcatcctattgccctgggttgtgatttatttcagttccactccaaggagtgaattgaggtcagctcttactcaatctgcaggctcccctcatttcagcatctttaaaagaagttggaaagcatggtcagtcgtttctgaacacaagccaactctgtaagtctcctgtagtcaatacacatccttcagtcatttgcaaatagtctagatggtggagaattggagaaagaaaagactgaagcaggcttatcaagtttaaaaaaaacatagaaactgaagtgagattcctatgccttaatatgacccactctacaacagacggtccatggcgtttagtacagtcaaaagatacaactcccacctctaactagttctgacctaaagtactttcatcactcaaatagaatactcctccttaagcagttactgcctgcttcccctccttccactcctgtacatcaccatttttctctctgtgtttatggatctgccctttctggatgtgttgtataaatgggaatcatttgtgtgactttggtgtcctgccttataggtaactaagaagtatccctctgtgtagtgctgctgccatcttccattcatggacatatttcagtatgtcttttggttgttccgagcagtatggttagaaacagctctccacaagtatttccttgagtacccgttttatgtcattttgtgaatattattaaaaacagaataactggtgtaaggcaattctgttaactttggaagaaattagaaccaggcatggtgatgcacacctacaatgccaatacttgagaggtgggggaaggagggcagtggctctagatcattctcggctacacagtgagtctgagaccagcctgtggtgctgggatacagactgtacagagatcccgttaagagctataacatggaaaactgatcttgatagaaggctatagggcaaacatcatgtggacgggaaaggatctagcaggccggagcctcaccggaagaacccaggagtatgtattctaaaggccagcactgagtgaccaaaaaaaaaaaaaaaatcatagcaaggatgaggaaaaatttttttgtgttaccctttgcgcctcccacgggggttattgaaatcaccgtttctttttctatggaaacaggctttcccaggagtgactgattatcagaataatctttcggaaatgcaaatctaatcttgctgttcaattgtataaagcactcccgtgattcctcatggtcttcagagcctgctgcaggcatcctacctggctcatctggactttgatgtgttaacagttcttgggggctttagcctcaaccaccctctttcctacacagcgttttcacatttcaaacacacacttcctgggaggtctgtaagtgggccaccctcttccagaccttcttgccttggcctgcagagctccttcaaggctccacagcaccacaggctgccagaagctcctcttggctccctagtctgagcgcctggaaatccctatcctaactccacgtgtccttatttgtgtcctttgctatataccataaaggaggggttattactctctttagttcttcctgtatctcaaatagttgagactctccttggctaaaagaaacttccagaacaggtgtttactgtgtcagcataggcagtgcccttgctttctaggagataatggttttccagcagatgatagatcatgagagaaaaggtggaagagaacaatagggaaaggagtgagaaccagaagacaagacaaaggaactggaggagttaagaggaaaaagaaagctgggagggggtatgggggataaacttgcagaaggcaggaagtagattctagtggcacctcacttcacaactgtggttccatccattctgcacccaagcgttttcttttctttttcttttcttttcttttcttttcttttcttttcttttcttttcttttcttttctcttctcttctcttctcttctcttctcttctcttctcttctcttttcttctttctttctttctttctttctttctttctttctttcatacaaacagagtcatttattggaggtgaatagttatatacattttgacaaacatatacagccatgtaaataaatactacagtagcgctagagcatctccatgataacccaaagtcccatcatgcccctctctaggcagtctcctagccctagccccatccttggcaagcatggatcttatttctatacttacacttttactttttattgcagccaattttttatcttgaatattttctttatttacatttcaagtgttttctcctttccatgtctccccttcagaaacctcctatcccaacccccctccccatgcctttatgagggtgctcccccacctacccacttccatcttcccaccctggcattcccctacactgaggcatcaaacaccctcaggcctgaggacctctcctcccattgatgtccaacaaggccatcctctgccacatatgtggccagtgccatgggtccttccatgtatattttttggttggtggcccagtccccagaagctccaggtgtctgatcagttgacacttttgctcccctccatggggctgcaaatcccctcagctccttcagtcccttctccaactcctccatcagggacctggagctcagtccaatggatggctgtgagcttcctcctctgtatttgtcaggctctgtcagagcctctcaggagaccgccatatcaggcttctatcagcaagcacttcctggcatccacaataacgtccggtttacacccaaactttcaaggtttctgtggagtaagggaagagatatgaagccttggtattcattccaccacctagatcccacctactcatattttgcactgtagccaggctcagagatactgagaggcactttgcgagagcagcttcacacaccagtttagtctgcttttaggacctccccgtcagagcacagtaatagacgttcaaggacctcaatgggagtgactgtcttttgccagttgcttgcgaggcatatgttatataacctttgcaagcatctgctaggtagggctggtgccttctgattgcagctcaacaggaaagactcaggaaatgctgggtgcaggagaggaaagaattcttttttttttttttttttaattgaggtctctaggagaaaaaaatgataccaggttcattgccaattccccataagggatttttagcaaatgtggtaaatgcagtagtgacgctggctctgtacacacattgctttgtgcatgcatgtcaaacaccaaaagcccaagcaagcttccagtgagtcactgctcctgggttgagcttcagcgtgacctcacccacctctgcaacctcagccaaggaatgagtcctcagtacttctcttctctacgtctgcgtctccattgccctttcttctctcacccccgccggttgattttgtaagccagagactagtcagccaacaagtggacatttttataatgctgaaggcgagctgagctctgtctccctgctgggttctgtaatgggcaggtgcctgtagaaagtgcttgttagtaggctcagagcaggcaagtcgagctggcagtacctgctctcacagacagacccctcccccgccagaagacctcacacatagcctttcctgaatcagagcatcttctcagactgaatgagcttgcagcaagtatttccagaagtgcatttggcaggtgcatggacagtctcagggctgcttgggacccagctccggctattgagtgtgtgtgagagatacagaattcccgaaggaactatggtgcaaatgtggtcgcaggtcactttgcagtaaaatcctaagggaaagttggctagcttctagtttctggagaaccattcagaatccaccagggacttcggctttgtggtggaactgacgtgacagcaggtggtgctgcccacagcggcctgttctagaggtctgatgtcatcccttcttcttagctgggtgggtttttttctgaggactgttcttttattcacatcggccatacacaggatggttctcatttgatgtttctctctccttgggtgatcggagtgaactcaggtgtcaggctgtaagcacatgtcacaccacgagttgtagcacagggcatcagtgttattcatagatagatagatagatagatagatagagacagagacagagacagagacagagacagacacagacacagacacagacacagacacagacacagacacagacacagacacagacacagacacagacacagacacagacacagacacagacacagatatttaaagggttcaggattaccatcaacctccagagtcacctcctcacctgactactttctgacaacatcctgaaggaggaccacacccatctgatctttatttctccacttcctgtttttcacccgcactcccaaagttccagactcctcctgtggaaggccaggctgaagtaccgttctcctgactgtagagtgcccaccagaacccacatcagccatctcatgccacatgcccttagcacttggttagctgtgttggtgagatcatcataaaaccccaggaacaccactgaaagatgagcaacgcattctcctgtcacttgacgttcagttacaacctttaggagagagagtgataatgaaattgaggtgccccagggtggccaccgcctagaactatcttgtcgcaggcaaaccaagaaagttggttactgaaacctcatcggagagtcatttgtaatgttaatagaattaaattatatcaacactactgcaagaacaggaatagctaccatttatatgatgccttgtgccagccagtgttctggctttgtatgtattaactcaccaacccttttttttttcttttcttcctaccctaagatgcgctctctctctttccctgccactcttagctctgcctcccttttccctgtgcaatcactgcactcatgtaattggacagggaaaactctgcaacattctctcaatttgaaggagtcctgtacagatgagatttcccagtgtataagtgtgtgtgtgtgtgtgtgtgtgtgtgtgtgtgtgtgtgatactggacactgaactcaggacctggcacatgctaagctgctacttaaccattgaatcacaccttggtacatcttctccttttaagtagtttttttataatttttggtgaagtccagcttatgaattctccatcgtctgtgctttggtgtcaagggtaagagctctctgcttagccaggtcttacagcgattacactgttttccagcttagtggtttgtatttgcatctgcgagccagtctgaggtcatttttaacaaggctagaagttaagttacaaaccttcttgcttatggacgtctaacttgtaacttgcatttgacaaactctttgagagtatcagggaatgagaagctgggaagggctcctggttaggcagggatggaatggtaaatagtaacccatttgtggggggaatcaccaacccctcttaacaacactgtagatgacacactgtctttatcccatttatagatggcgaaacagagattcaggcatacctacccatgcccatgcaggagacgaggctttctggtgtctctaagttggcacagggagtccttgagagagctagtcctggaataaaatcgactccaaaccctgagtgctttcccttcactgactgtggctttccttctgatgaacatctagcatccttggtcaagttgagaagccattttaacaaacacactgattgtgacacctgataaagatttcctggtgcttgtgtagggtctccctttcagtagcacttcctgattatcatcatctttgtcccaaccagaactgtgacaccgggtgaagggatgaagcaacgctcaggttatgggtcatattggctctatagaaagtgaactcgtgaccggtgtaacagtcagctcaggctgccgtaagaaaagccacaggctgatggcttcaataatagcaatgtgttttctcacggttctccaggcccaaagcccaagatctaagtgccaacagggttggtttctgatgaggctgtctctttcctttcttgaagtcagttccttctcactatgtcttcatgtgacctcttttctgtgttccttcactaacacaatcctagagccttgtggtttctcttcctctttctggaaggacagatttctattagatcaggacctctttcttaagacctcatttaactctttccccaaatgcagtcatattatagttagtgtttcagccaggcatgatggtacagacctgtaatcttagaccttagaagacagaggtcgccaggcagtggtggcgcacgcctttaatcccagcacctgggaggcagaggcaggtggatttctgagttggaggccagcctggtctacagagtgagttctaggacagccagggctacacagagaaaccctgtcttgaaaaaccaaaccaaaccaaaccaaaccaaaccaaaccaaaccaacaacaacaacaacaaaagaagacagaggtcagacaaccatgagtatgaggccagagtgggacacccaatgagtttaaggtcaatctgagctcctatctcaaaacaagtaagagtatactacttccaataacaagcacccggagtttcaaggcatggattcagagggacatggtttgatctttgagaacttaacaatctggttttgtgactggtgatttcttgagttcgtgctgatcctatacttaaattgatagttttgtacagggatccactaatgcagtggcattaaatgaagaatgtagtattgttttaactgacttgtttatgcttcagtttttcaaatccataattgagactgtgggtgccattgttgaatgtgattgttctgggcatctaaccagaacgtacacctgtgcaatgtacagttcttagaaaatccaacacatccattgggagcaaagctactgtggtgtgtccaatggggtgtctcttccacagcgaagtacttctgccattactgatgatcttgacacagcagatcttagactccaggacagctgtttggcgcagtttctttcatttcttggatatttcatttcctggatatttctgctatggtttagacatgatctgagcagttctcttgggttttacatatgggaggcttggtctgccatgtagaattgtttgatagggatggagctttaatgcatagagtcaagtgtaaagtcactgaaggtgaggtgattcccttagaacctcctaattagttatcatgagcattgttataataataataataataataataataataataataaaaagcaagactagtcatttactgtgctttctgtccattcctctctccctttatgtggcttctgccactgtggtgccacctattatgagcctcccttgaaagcttaagagatgctgccccagtgcccttgaacctccagcagtgtcagtgctgtggtttaaatgtgaaatgcccctcataagttcagtttgaatacctggtccctaggtgtctgtgctgtttaggaaggtgaaatgtttagagaatggcgcattaccagaggaaggatgctactgggagtggacctagaggtttcatagcctagccccgcttcctgttgtctctgcactgccatgtgctctcatccactaccatggactctatccccttggaatcatgagccctttctccctaagctgctttaccgagagtctcttatcacagcagccagaaagtaaggaagacagttggctaagttagctttcctttacaaacttatcctgacagaatttcattttggtaacagaaaacaggctgataactttattaattgttgtctggggtcttctaaccatacagtccttcctacataagaattcttgggatgtgaaattttctaagttttattctagaattttatctttgctcctgtttcatattttctttcttaagttgctttctcacagtctcaaccatattattctatctcctgtaagtagttagtgctgaaacacagtcagcttttcttatgtgacatactgttctatttttctcttatttctatgaacattgacccaacacagtattttctcaccattggcctcaggcccatctgacttcctgggttttacttctttccctattccttaggtttctgctccaaatttcacagatgtctctatggctgtctccggctttcttcctgtagcagctctgttttatttaccagactacacctgaggactcaggactaactttaacctcttctgagctccagcctctctttgtatgtaggaatattcttctaaatagtctctaaattgggctgagagatggctcagccattaaaggccaggctcacaaccaaatatcatctttgagttgctcctagatttttttttcattactttgcattacagaatagcaacatggaaaaggacattgggaggtctaattctataccttaggacaatgtcctacataaaccaccattcaggaggaattttagtgctgcgtttgtcaggcaactttccattttcatccacttttcaaaaacgtctttctcaaataatggatgatctcatggagtgctcacaatccatcttaaatgtgattatttgtactgtttaaggcttcagtcaagtttctcatcaatgctacttgaagagtgcatttcacagccagcagctccgtactaggcagtgtcctcctgcctgaaatgtggctattgataggcatttcagacccacccatcaccatattcatatgtgctaaaggtcttggggaattctagttaggagttctcagagctgcagagaaatgacgagcatgggaatcaaggtgagttccatcctacctagcattcgtgctacaaccagcccattttccattcctcccatcttgttgtttataatgatactattcacagaacggttagaacttctccaggaaaccagcactcatctcctctcccttaactcaaagcactggttattagaatacgaccatttagtagcatcaagatgggaaacaaacttttaatacacggacctctagggatatctcagatccaaatactagtagatctcaaaccagtgagagttaattgattgtcaacttgataggatctagaagcaccaaggagacaaacttccatgaggggatgtctgtgaggggatttctagatttagctaactgaggtaggaagaccttctctaaatgtggagagcacaagtcccagaataaatagaaatgaaaagctagtcagggtaccattatttggggaaattttattaagctggtataatttagtttttctctatcagtttcaaaattagcaagagcataatttaggagtagaaaaggtttttaataataccatatgaaattatcagatagaaaccactcttactaaaaggctcagccttttgcgttaagaaatacaagaagtaaaagatccttttactgtgtgcttctttttttgtttgtgtggtttttgtttttgtttttttgcttttgtttttttgagacacaatttctctgtgcataaccctggctgtcctggaactagctttgtaggtcttgaactcacagagatttgcctgcctctgcttcccagagttctgggatcaaaggtgtgcaccaccatgacttggctatttgtgcttcttaattccttgtatttgtatagtttgtttgacaatttttcaaaggaactttcgtagcaagatgaattttacattgttcagtcccaatggtagatggtgtctgtctgtttgtccccctaccctctgtgtgtgtgtgtgtgtgtgtgtgtgtgtgtgtgtgtgtgtgtgtatgtgtgtgtgtctatttggttggaaaggactctggtaaatgatgccctggggcacagaggtgaggggtgacatggagctggatggagctgttagggtcgtgaactttggatgctgactcacaagtgtggtaccttccacaagtgccgattcctcacctgctagagaagagcatagcctcaggctgtgcaaggggcaccccaattgtcagtccaggacagtcctgtgtcactttcacaagggcccttagggcttgtctgaggaccccagcaaacctcccctaaaaccctgtttcagaacaaaagcaagacaattttgaaaggaaaatctagatataggcttcttttcctctctgctagtggtaatttccctcaaggcaagggtacatgttactgagggctggtacccacagcaacaaaggcaaagaggagaagccaaaagatgaacatcttggacatccccactgaggacttgggatgcagaggggacgtatcatatctgggaaagtgagattggaaaagccctgataaggaacccagagctgatgggatccaagctgcctggcagccatccatctcctctttcaacacagaacagtgccagttctaggccacatggtcctgactctttgaaatatacttaccagagagctaaagctgtgtgtgcgagctatgctacacacacttccagcataagctaaaatgcaaaggcgttccagggtgtgcttaactttgtgtagtcatggggcaggggtgggaccagcatccacaagcgaaaggacagtggcttaacttcactcataattcaaatgactcttttttttttaacctttaaagtatttagactttgttgattttctttgttctttgaggcagcatctggttatgtagctcaagctggcttagaacttactatgtcagcatggctggccttgagctttcaatcttcctgccttggcctcctgggccctggggttgtaggcatgtgctaccacacatggttgcttctctggcattcatcttttattttaactgacattttcatatctaagtaaaattctgaaataataagaaaggttttatttctagaaatctaaactaagatgaaggttgagtgtctaagaaccagttatacattcctttctagctccaccgctacactcatatagaaaggcattctgggaagatcctgaggaggaaaaaaaaaatttcccttcttgggttttggggacgaggttagttttgctaagttgggttcaagatttcaaaatgttacaggtcatagtcctctacaaagcatatgcaaaatatccagcaagaaagaagggagtgaatatttaagaattgttttaactgatagaccctaatttttaagatatattctgtttgtcctcatatctgatagacaaagctaaatcggttggtcaggtaccattttaatgcattagtctgcttgagagaggtcttctgccaaggctttcttcttattgactcgtagttgctgggcaaatgtctagaatttctataaatccaaagcaccatgtttaatacttatcattcttggtacatgtactattctggggacaagaaaggtgtcttcagatatttacgtggatgtcatgagtgaaagaaagcaagtgtggcttgtttagaaagaatcaaagacactggagataacggaagatcttggagaaacatctcagggacagatttaaaaacaacaaaaacaacagcagcaataaatataggcctaaaattttagacctttcagaaaatgagcagatgagttctggtccttcagatgtcggggtggaggctggacaggctctgacttggcacttattataaagatggcgtagaagtgaacttgatactaagatgctctccaaccttgaaatcaggagacagtacgtgtattagaagttagactttgtcctgtctaaccatcagataagtagccatttagccctgtcagatactactacacaacacggcatgggatgccgttgttctgctaggagttccacaagtcactgcatgtccacaaggtcttcagagaagcagccacaagtgaccctggaacaacaaacatgtcttagagtgcagactcagaaatatcgcacccactttctgggggaccacaccccacctcaccccaccccctgcctctccattatctaacctggtaccagtccagaatctcatatattctccatgtgcaaagcatgtggcaaatagaagccaactgagaaagatttctcgtcttttaggggtcctcaacacctcacacccctctctcttacttcccctttatctcagactgttaactcacagtagaaaagcaatctctcttttgaatgtagaaggcttaatgtagaccctctcccagagatctctgtttttcatacaagttctggttgattaaagcacaaggaaacaaaactccacccagtaacttacccctgaagagagtggccctgtgactggcaggaggtccgaggggcagtgaagagaaaaggaaagagccatctgatgcagctgatacaggccatctgatgcagctgcctggactttcactgaggagaaaccactgaactaagatatttttgctggtttccaaataggattgtggaatagaatttcgttattgcagacactgggttcatgggcagtttgtgccttttccattacaaccatgtgtattctctgaggaacctcccctcatctctcatgggagactctgttcactgggacatatggccgtaccagatgcactctcaatgcagtggcctcccataaaccacctgaagcatccttggtgatttatgccccaaagccctgtggccacacatagtcttgggcgtaggaggaatatctgtttctgttttgtttgttttatttagtggaatttctggttcacattatacccattaaaatatcttctgggaaagaatctaatttatacctgataatgtaattaatagctatcatgcttttctaacgagaggtagtccgggcctgggacctatccaaagatgcaaggaggcaaagaagcttccactttctagggccagcctgctccaggatggctgttttttaatccccaaagcaagcagttaatacacaatggctaaagcgtcaaatgctgtgggatgtctgagcacagcgcatgtgaattcgcagaagcaaaaggagccagcgcagttccttctcacagcacctggaacctcttagtctctgcagagtggcaaattcccaagagaaacttttctacacggaacttccttgtcagtcttagctcattggtgaagctcattggttaaaagtccctaaagaagtcactttataaaaggggaatgttctatggtcctgaatgttcttggtagcccaaatctgaccatcccttgccagagagccgtacccctcgtgtaaccaacagatttggctgttgcccagaattttttagttaacttactaacctcgagctgtttggtctttttttttttttccttctggtactgtgcaaatgctgtgtacattgcctacattcctagtcaaacagcccagaaaacattcacgaatacttatttttcatcttcagtttatggtgtaccaacttgcttaactggccagttcttagaaatattaaagttaatagagctatgtgtttgtttgttccctttgttcttgagagccagcctaatagtttttcaatgagcttctgcagacttgacctatactaccccgggagcttgtgtaggtgtgagtctgtgggagattggagcaaaaggataataacagtctttgagaaagcaatccatctcccccttctctaagcactccatattccttgaagggaaaccttgatatttctaccaagtaaaagaagacatcctaccctgtagtctaacagactaatcaataccaatttttttcaaatcttgtcccagttttcacatccctattaacaccataggtttgacagttaggaataaaacattgtaaatacaaaacaacttgaggtttttggagttatctcagcatcttcgtgtgaagaagtttatgtcattagtgatactttttaactactggaatatgtgctccattttttttttttgacaaagtctcttgatgagcccagagctcatgtatctggctagactgctggtcagaatatctaagatcgttctttccatgtctccccaaagccagattatatcaagaagtccagatttttacctcagtgttggggtcctaactcaggatggcatgcttacgtggcaaacacattcctgactgagtccgtctcttcagtggttttaataaggttcgactctgtcactccttaccaataagcttcttttgtctttgagtctttatgacatagaatagacaaatgaaaccacgcttgctaagcacccagcactggctctggtacatgatcctttgagagatgaagcactctgccacactctgatcacttttctctttcacagactagattagtgtatatttgagcttagacacatgagcnnnnnnnnnnnnnnnnnnnnacacacacacacacacacacacacacacacacacacacacacacacacagagagaaaccaattttcctcagaatcttatcgggtggcttcattcacttcattggtcctttctacctttcccagatatacaaagtctatactacataggaagggagcagaaaattcttatttacatgagaacaccagtgttttaggaccatcccttgagatgatgttggtggtgacaaaaaacacaccttacaaaatccataaagtccagctgttccatcctcagacacctttcaaccctctgcaggtaaagccttcaccctggcctccttggggtgtcagcttctattgccgttgtactgcaggctccttctcgggcaccagtgcgtgcttcatcacctgggtcactgtgtgttgggaagaattgcctaagaaaacccaacctacattgtaaaaggatttcttcaatctggttgctttgataatgatgctacattcaaaaagaaaaagtccacagatgtcaaaatgtaaagactgtgactttgaatttcaatgtgccctacactaaggagtcaaagtgttcagagcccaaccctcactgaccacattctgtaagggaaactggagcagaagtggagtcgtcttccccgggggagcttggtgtgcacaggggcggagcagccgcccagctgcactgcccattctcttaaacatggcttcgtgttttggggcagcactttcctatctataaaaaggcaagtgagaagaacaataaaactactcaaggactgtggtgggcttatatataatatgcgtgaagcctgtttgacgccctgttaagtaaaggatcttcattagagaatgagactaaccaggatgcctcactgatgttgaaaagatagcacgtgtccatcggacaatcagagaatataatcctgctaacagcatactaagttctgggaattatattatcaggctgaggcccagacaccgaggcttctatatttccttgggtaccgtacttattgggagaggttacaattatgaagtgctaccccttggggtgcttagaatgcagaagtttattgtttcaatgttctggagactgggaatctgacatcaaagcactggcagggacatgcttcccccacaaccagaaagggaaggacccgtgctggttagtttttctggttgaccgacagtcgagggttatctgggaagagggaacctccattgaggaagagctttcgtcggacaggcaagtctgtctggcattttctggatttctgattggtgtgggaggatgcagctccttcaggatggtgctactgtgtctggcctgagatagataagaaagctgggagaactaggggaaccaagtcagtaagcagcattcctccacggtctctgcttcagtcctgcattagattccccctgatgatgcacagaaacctgtaaggaaaaaaaaaaaaaagatcctgttctcccaagttgctctcagacatgatgtttattacagacaaagaaatctggctacgggaggacccttccttccttcagctatgggtagcttggatcttgcttggtttgtggtggcatgatcgctttcctctggtatatctttatttccctgttccctgattctataggcgtgtgcggagatcagaacagggaactcaagtgtcttcctgtgttgctctcagagttattgcctcaatacgggattaaacagaagtcttgctgttgttggtttggcagcctgggcagtgagattttgggagctgccttctctgtcccacagaattagggctgtaggcaagcacagccatgcctggctttttgtgtgagtgttgagggtttgaaatcaagtactcgtgcttgcagagcaagcacacttacacactgaggaatctccccagtcccaaacttctccttttcataaggtcactagcaaaaggcccgagtgcttccctttttgtgtgtgtgtgaagttggagtttattaaggaaaggtttagtgtggaaataaccttgggtttttaaagggcagcttaggaaaaggacaccagtatatgccaagggtgagtgtgagcttaaaacttagcttgacttacctcttaaaggaccagacttccaaatgtccagttctgaggagctgggcttagattttcagcctgctttgacacactttatcattaaaggcaaagtcccttcactgtggtggcatttacagactgctcttaattggatctttccaaattttggagtcacctattatctgtggccgtctaatttggtgaagacttgctgtgtcagtacaggtgatgagtccttgcttagtagctcatagctcatttgatcatcttcttaaaataccctccctgctacattagaagtgttttagttgcagaggtaatttgttcttactctaacaactaaatacaaaagcacaataaataaaataaaataaaataaaataaaataaaataaaattctcccctgctctctgccattgtctcctcctaataccaaagtagtatttccagcctggtgtcagcctctcctctgttcttccctgctcagtcatgtgtgaatacgcctgtcatcttgggttgtttatccccacagaaataagatcctgcctgccaggtacttttcctggtcccaggtcatgcaaggaaagctgtttctttttgagagtcaccaaagatgtgggtggccccacaaggtgtcgatgcttccctcaatggtggaaattcagatcaccactgcctccccccccccccattttgagctatagggatcgatgatgaatggaggtaaggggcctctctttgttttctcactgtgcaactccgacatgcactgtttatacagacaacagcagcaaggacgacatgttagctcctaacacaaacacgaatgtctgagagggcgtcggagtgtggcaatgagctggcccactcactactgctctaatgccatttgcctgcctcgggaaagcacgacaagactgccagggaccgagagggagcttcaaaatgaggttggaagcatctctgagcccttaacttaatgatgcctgagtctcgctaatttgccgttgcattgttccttttgtgagctgagaataagccttcgtatgtcacacattccaaatgcaattcccaattagactggacaagcaggctcttcagtaagaaaaaaaaataattagagccgactaaagataacctgccttttataggtaagtttaaagtcatgccaccctccactttagggtaatttcagggcttattttgtgtataggaacatcaggaataggtaccagatattgtgttctaaccactggttagcatcactcagacaaactggttctattttcatgatcaatagccagctagtgtgctgcaatgacctgggataacctgtgagcacacaggcaggacatgagcttataggtgtatatattttaactgacaaggaatggaatgtgactggaattggagagacggaagcagggcttgcttggatacaacactgccatgtttgggtttcttactcttcagaagcttgtgacagaaactagtaaccatcgaatatttgatattttgcagaatattatatatagtataatactatgtattttatgtaacaaactataatgtaaatcatagggatacatgtaaaggcaggtatatagatgttggtagatgcatatatttcaaaatggaggctgggcagacacacagtgaatgataaatgctgccatggttggttggtatcagaattaaaaagttaagatagattcctattcattaatcatctaaaattttcatatagattgaagatctaaatgaaaataaaattaagacaaaagtcatgccataataaattgtttgtataactcccaagacataatcactgagggaagtcagggcagtaacataaggcaagaactcacaggcaggagccaaagcagtagccgtgtggaatgttgcttactggcttgctctccctagactgctcaactaactctcctatacattctggtacatctgcctaggaacagcacctcttatggtattctgggccatcctacatcaaatagtagtcaagaaaatgctcccataggcgtgcttacaggccaatatgatggaggccagtcctctgttgaggctccctcttcccagtgtgtcaagttaacacctgagatcagccatcacaatgcaggtttaaagttcccatccagaaattgacagtcagtaagaataagctgtttaaagcttagacgacatgtgaatgttgtttggttgtatttctctatgtataggcagttgtccatactcccaaatccaggcagcctagaatgaaactttcctgtcatgctgaacaccagaccccaagacctcatcccgtttctctgtgatgctcaccgcacacggccatgccgactctctcttgggttctcagtctcttctctcccacttcctcctccctaccccatgatctttcgatgtgtgtgacaatgccctcttcttcgtgtttgacaagaaagaagtagggcagggagccacagatggagagaatgaaccagattggtcacgttcacctctgctgtatggataggacaatggtgccattctcctgtgtcaccttccctcacacagtcttggttgtctgcatcgctccacccacttagcacccacagctggatgggagcagagcaagacaatcacgctgattcacctctgatccatcatcgttaaaggcagcccctggtgctgcgcctcagctctgccgcctgaccccagtcctgcctcctcttccattccacccatatcctctgctcttccatcgagccctggcatctcccccctcctcccctctactgatgaccttgtagctctttttaattaaaagacagaaacaatgagagaagaatcctgatgcagcccatccgcgaatcttccctacccgcctccaccttcctccgctggcttcgagaatgactgtgcacctgtctttgcccaaccccagcctcttgtgcgttcgattgatctcctgcctactcagggcctagcttcagcagttctccttgttcttacgctgccagtctcccccatctctactgaatcactctcatttgcaatacagatgtcctctggtcctcccatattagaacatcctgggtgggcgcgctccctcctccccttgcccatctctcccttctgtctcagcaggtgttcttcactcgtttgtgccgggactctgttaatggtctagtgaagcctatggactccttctcaggacaatgtctttcaatgtttcaaataggaacatagggctacagaaggaacacatgatataattatcactaataataatattttatctggcaggataggctaacattttccttattaatatgctaatgcatttaatataaaagcaagctaaaatttttaatttttaattttttttacctttattttttgtgcattggtgttttgcctgcatgtatatctaggtgactgtcagatcttggagacacagacagttgtgagctgccatgtgggtactgggatttgaaccctggttccctggaagagcagtcagtgcccttaactgtggagccatctctccagccccctacattttaatttttaagtaaaaacaaaacataccactgcaaagttctctgtagttataacctttacacttcctgtgctccaaaagtctatgcagtgttataagggttacaacttcccattggatctattaagtttaaacaatgaaaatggcttgcctgtgataacattggtgaacaaggtattatgtatagaaaaggaatggagcactctagatttctcccatagaatgatgcagctgggttgaatattcctgagtcactctcatgatcacttgaaatctagtcccatgtataaaaacaccttggcgacagttgtgagcatggtgtcttaaggtttctgcagctgtccctatgagatgtgaaatacattttccataaactgagaagtaacagactactgatactacattaatgatggatggaaatggagacgcactatagagtcaaaataaagtttcagggttgtgccgtctaagttggtagattccttgtgtttatccccgggttcttcagggtccctcatttaaggaccctgctcctcataacagccctccctctaaaaagctctctgttccctgccttctgcatctcctttgttctgtggaactctcttcactcaggattttgtcctcataatcctttaagagtaaggtctgggtaagtccttgtgagtgacttttgtattgctatagccaatgaggttgcctgttttatccatgggacttcaaagaactgatcgttcttttctttagaattagttttccctcttgggtatagtctttgcacaaggacatattttatatatttaatattgagtgtattctttttcattaggaattaattagcatattccatgttgggtttcattacagtattttctttcccttttttttttttttttaatttttcgagacagggtttctctgtatactcctggctgtcctggactcattctgtagaccaggctggcctctattgattagcctcatcctcctgtcccaccctgaccccttctactggccccccacccctcatgggccttccattttcatcttacctgtcctactgccccctctcctctccctaaggccttttgtctcatcttgaggttttcttctagtttgtagcctctcccatactcccctcactcatatgagtccatgcaaacataacctaggatctgagcatgagggactcaggcctgttgttttgggtacatcctcccttgggcttctctctggcctttaaggttctcagatacttaatgctgccgccttctcttctgacatagaaatcatggtctgagccaggactcagtccttccatttattcattctctctctccctctccccccccccccccgcccatccttttatttatctctccacagttataacatcagcctggaccaggctcctgagattcagctgcccattcactatccccacatttctaatggttgcccattagaaaaaccagttggccatgggaatttccactcccagtgttctcaaacctgcttttcttttggcttctcctcactcagttaatttcagctctatttcctgagaatttaggctaaactcctcactgtgatgttaaccccatcagcatgcttgtccattctaacatcagagtatgtcttggagttaaccattttctcacctcagtcctgtccagtccactcatatgatcccctaaggaacctcctccctctcgcccacttatcctattattacgtttcgaagtttagtaatcttagaagcaactcatttaattctgcttctttggattcaaatgcagcatgcgcggtgcctcatgatattcaaagccctccagcactgctaatggatgtgactccatagtaacgagtgtttcctgtgagtgacttgtggagttcattcagtagcaaaatctcgaatataataagattttaaatgatgctctgcaggtttgaggcacggcatctcgattttaggagcttattgttaaagaatactcagaagttgtttcaaatattcaagtgaaatcatgacccacattcctcaacattaagggactgctgcttctgtcacgagatcgccagacacgtgaaatgtgttagctcacagcaccttcttctatggttctctctcttctacaaatccacaaatgagaaaaatgcctctgatggcgtcagagtacaggtaatgtttaagcaattaattgggactcttgttcaatcagaactgttagacggtagtaggagtcacggactccactggccactggagcgcaagtaaaggcaggggactccaggagagctagatgagtggaggcagaggcacggtaacatggagggtggaacctttgtgaatgcatctacaggctccaccttgaagctcttgcttaccatgtctaaggggctcagccataccacagccaactccctaaatagtgctggcttaagactaccaaagggtgaaacatacagatatcatacagactgtaaaaactttgctagaaaaatgtccatatggcacattccataaagtggactctactttaaactttctagagtcataattccagatgtctcttactcatttcttagggactcctacactttacgttattttaatttttattctgtaggtcataaaggtcttgtagatttattgcttctgcccaatccactaatgaagatatttaaaacagatgaatgtgatctattttcttttttgaaaaaaaaaaaaaaaaccttttttttggttctttgtgaatttcacatcatgcaccccagtccactcatctctccctgtgcccttcccccagccttgagcaggctaaatagaccttaagtccttaagtgtttgccacagttggtcttctgcagacctaggtggagtcttctgttttgctgcacctgcaatttcctacaggagcagactgcctgctgagcttgctttgcaacgtaatgcaagacccaccaaaggatgggtctgtgggctctccctatataaatactaaatactaaatactaaatatttaatactaaataaatgctaaatactaaactttgagacttgattcaggagcctttgtcttggctttgtccttctctctgccctctccaccccactccctgtcctttttcatttccaacctcccttttcaggtacccagttcatccatggctgctggacagctacatctcccctccccttgtacctgcttcttccaccctagcaacctctcctccaacagaggaaaaaaaaaaaaagatctctttgtggaagctgtgtgtccaacagcatacccctttgtccacacttctttgtttacaaatgttcattgtaatgagtcattggtctggtactaggcctctggcttctgctatgctatcagtactggaacctcaatgggactcctcttggatattctgttgttgccctgtgtcatggagatcctgtagttttggtactgtagaacaaacgtgccccttcatatgctctggcagtttattgatgaggtagatgctgggataggccaactcaaagccctggatctggacctgagaaatatctgagctggttagccctatatctcttcaactctggtgcccttggggctagattatccacctcaactcctttctgcaaccagggtcagctttaccctcctgcccatgcaaaatacagggcccactcttgtgagtgttgcaggtagcaagggacagtgtcagttatcccactcttgtgaccctaggaccagctttcctgcctgccataggtggtgagggacaagggaaagtaggtgggcatctctgagattatctggccaagaatcagtaattttgtggttggaatggaatgtctgctagatactgtcttggcccctggtcaggttccacccaatggcaatatctgaaaggccatgtgaatgaatagctccctgtagctgtccacaggtaaggggtcacatgaggtcataggccagatgctaggagtgaggagcaaagcagggaagctctgatctgcacattgtgagctcttgtgatgtggaagaaaggcacacttaagggcagtctcaaggaatctggaagacaggccaacaggacccagagggaaaggaatggcatcagaggcacgttcacaatgaaagcaacagccagccggggtcagatggggctaggcatataaccgggagtctggcctgcagtttctctggcatatatagtgtagttaagttttcaaatatggaaagcactataaggaggtcccatattcccttttacccaagttgctacctgtcatctctcacgtactaaggtaggctgtatgcaagcctagcctcttttcttgcacaattctgggtattgcacagagagcgggtgctgttctctggcatcagctggcaagcatcctagactcacaaatatgaacatggataaattccaactcgaagttattttgcaagcaggctgagtcaacaaatcttggatattgactgggcttagtcctttaggaactgactcaatattttatgaaactgacttagaaagttcagggggtcctcaaaataatggaattaaaataggatttgtgatttccaccaagttcttgagtttacaaactacaactgcctttattaatatctttctgaaatttctgattgtcaagaagctccagagtaacatcaaacgtctggcactggaaatgctgtgaatcttggaagttcccgcttctcacagggaacacttcataggaacttgatatagggagaagactgtgagggtgtcagcgtcttaatctgttttctattgctatagcagactgggtagagagaggcagaggcagagacagagatagaggcagatagagacatgcagagagagacacggaggcagaggtatacagagaggcagagacagagatagaggcagttagacagaaacatgtagagagagacacagaggcagaggtacacagagaggcagaggcagagacagagagacagagacaaagatagaggcagatagacagagacatgcagagagagacacagaggcagagacctacagagaggcaaagacagagagacagaggcacatagagagacagacagagagacatacaaagagacagagtcagagacagagatagaggtagatagagacatgcagagagagagacacagaggcagagatatacagagagtcagagacagaaagacatacagagagaaacagagagagagagacagatagagagacatacaaagagacagagacatacagagagacagagtcagagacagagtggtcttccctcacagtgttttgtttttgtttttgttttaaattttagtttagaagcaaaggtcgtatgcacccaaggctggccttggactcttgattatcctgtgtctacctccaaagttctgggattccagttcttactactgtgtctatttcacagttttagagtctgagaaacccaagtccagcattagcttggcttctgttgaggggatcttgctatgtcatgttaaggcaagacatagacagtggcatagtcagagaaagagagagagagagagggagagagagagagagagagagagagagagagagagagagagagtaaactaaaatatagcagtggaagacaagtatgcttttatacccctactggcttcagcccaggaaaactagaacttactcaaagaagaaggcattgatccagtcacaggagtctatgcccatgatccaaatgcctcccccagcattgaattaataacatagaagcttctggagggcaaactcaaacaatcgcagtttggttcatgacaaaaggttggtctgaggcaggtgggttatctggtgttatcccacggggcccagcacaatcactggagttgggtatagtctagatcttaagagttcctaaactccatatgttaaaggtttggtgcctaattgtgaggtgtggaactgttcaaaggttggacttcctggatggctcttgagttattgtgagcataaaagggatagtgggatcctgcctcatccgattttcttcctgaccacaagacaagcagccttgctccaacgtgtgcttccatcatgcactcctgccatgatgaactgattctcttcaagcaatagggccaaccagccatggacttgacacctccaaaaccatgaaccaaaatagtactttctacttatgaattcatttatctcagtagtggatgtctgcctaatacagaatccttgtaagggacagagggggagagagcactgtgataaagactcagctttttctccttctccccctcctcctcctcttcctcctcctcttcttctttcttcgttcttctttcttctttctcctcctcctcctcctcctcctcctcctcctcctcctcttcttcttcttcttcttcttcttcttcttcttcttcttctgaattgaaggaatgggtttgtgagtcaggaaaggcaggtggtttacaggaatcaaaggcaaaacagattctccctggggacctcccaaggagcatgcctgtcctgacactttaattttaggccagtaaaactcacatttgcccatcccgtcctccctttcttttagcactggaaatgtcattagtcttataaacccttcattcctccctttgtccctttcctggaccctccctctctagtttttgttttttgttttttttttctgtttgtttgttttgttttttgaaatatggtcttgctatgtaaccctggctggcctaatactatgtagcacaggttgggttcaaattcgtgacaatcctcctgactttgcctctctagcgctgggatttcagacctaagctactatgcctggctccgtttctgacttctgactctccagaattatgaagtaacaatctgtgttggcttagaccactggctcctggtcgtttgttcaggcagcagtagcgaggagagatgaaatggagcctgctgatgagcactgcctcagctgctgccatccacatggctttttaacaaggtttatcaactgatgcttgtaattgtcattgatggtagattatgaaattagggcttgccgggcagtggtggctcacacctttaatcccagcacttgggaggcagaggcaggtagatttttgagttccaggacagcctggtctacggtgtgagttccaggacagccagggctacacagagaaaccctgactcaaaaatcccacaaaaaaagaaagaaagaaagaaagagagagagagagagagagagagagagagagagagagagagagaaagaaagaaagaaagaaagaaagaaagaaagaaagaaagaaagaaagaaagaaagggaaataaataaattagggcttgtttctaaaggatattgtttgtaaaactgtcagtttcctaaactaatcagatatgttttaacttggcaaaaaaaaaaccctacagattctaaggccagttttcagactcttgaagatgcatcgtagcctaggcacttagcattgttttgcctgcttagtattatcacagtcagaatgcgtgttttagtggacattctttcctggtaaactaaaacaccaaattatacattatagtacatatatttgtctatgctatccaatatgcctatgttatacgtagatgataagtatcagacttagagttaataagtcaatatctgagctggctctgaagaccccagactgttgaggttaaagaaaaggaaagaaacatgaagctgtttggttacaaccgtcttattcctctccattagtattcactcaggaacaacatattccagtttctaataatttctaaattgctaggtcactcactgagtacggcaccaggatcaccaaacagaggagaagcgaatcagaaggcatttgttttggagatcacaacctctgcaagaggctttgttgccgtagttggtgctcatcacggacaggaaggaaaacaagatagcgataatgcaggctgggacaatgttttcaaagaaagttcaggttcttacttttgcacaggaaaaattccaatctgggcacttgggtggctttggagttgatttggcaggggcagggagaataaagaaggatagagcacagaaaagctgggattgggtgggctgcaggctccagtggaggttcaccagcagtagcctggaaattcacaaggagatgggtttagctaatctctgttgtaggtctgtgcaaggaagcttttcagattgccgacactaaggaggaagctgtggctgatagtttctgcatacagtggtttaaatactgtacatggatcagaggaaggcttnnnnnnnnnnnnnnnnnnnnagtggtttaaatactgtacatggatcagaggaaggctttgtgtgtgtgtgtgtgtgtgtgtgtgtgtgtgttatttgtacttggagctaccacctcctaaaagtgtgaaaattaagagggatcaggttgtgggaggagaaagtaaggacggacagcccattatttgtgatgtggaggcaaaggagaaagtttggggctgaaggcctgaggggtcactgttactactggctctatcacaaaccactttataagggtgagtgtttctgaaacatgctgtgcctaaggcctttgttcagtaactttaccatggaggtgagtgccttcatatccagaactttatccagcctaccccctttgattagagagaactcccagaaggcctgactaagcctggtcccagagcagttgagaagtgaatcccttagcacctgggaactgaggcagccctggcctggagcccgtcttcatagtcagctcaagttgaacccttccacggttcccagagctccaggcaacacagattcagtcatctaccttttggtttggggaaacacttttcaaccaattactattcgaatctgttgtgggcaaacagaaagcttttgaattttgcagcctctgcacacagagtaaagatagagtgcacatgcctttgtcagctctgacggctatgcccacaccagtgtgtgctcctgtatcaccacacaagctaggcatggatgcctgcctgcctgcctgcctgcacgctagccacaggcctggcagttatgctcaatgtatttataggttcagtagccagggaacattggtgctgttatgtaactctggaagctctctgtttagggaagtggccttattagaaagagagatgctgctcagggacccagtgttggtattttctggtacagctgaggcagctgccgagctgcctctgctaagctagcagcggaaggaaagtaaatgggtctccagagacatccagatttgtctcccgctcactacaggcctgccgctctctttacttgatgtaagacatttggagaggaagacataatacgcgcttgccaattccattatgcccagtgtgtgattccgtgcttaatgcatattttgactggctgaatgcctgctatattaaacaaaactaatgcacagctgtatggcaacaggaagacatgggccatgtctgttctggcagagaaagtaaatttgaggtatatatcttagggagaaaactatagcacctgtatttccctaccctgcctatcctgggttttgtttccaaacattcgtttctgccatgttgagaaggggaggtacaatggcggtacggtggagctcccggtcagctcccagaatgctttccgagttgtgcacaatgcgtgtagacgagaagagcaagcagagtacaccagagcttggttcagatcccagcgcagcctcctcactctgcctcacgacttccgactgtgtgcttatctcggactgagctttgatcagtcttctgacctacttattcttttttagcccattgccaatacattttagactcaagttcaccatggggtcgtttggaacttcaaagttagaccccagagcagatggacatcccacagagagtcagccagtcttgctaaagccttccaaatgggcaagtcaccttttaatccagtgtggcttcattctttcacaacggggcactattccggacatctgaggactgttgactgacggtgggtgagaatccacatccaacctgtcttcttattgacgtgtttgtgccaaaggcaagctgagttccgttagctgattgttgcgaatctgacagcataagtagctttccaaatgactcctcttaactttgaacaaataacttgctcattaagacagggtggcatttaagtgccagagtctctgaactttgggactcttggtttttcatgccagatccttttcctctgggcctgtcctgtggactgtagcacatttgcaacatccttacttctaccaagcatcttgtattattatttcttcttcctcttcctcttcctcctcctcctcctcctactacgggaactactctaagatgtgtgtgtgtgtcggtggggggtgatgatagtaatnnnnnnnnnnnnnnnnnnnnttttatcctcctaaacccacaaagtccactgagagctgcctgtctgtgtatggatgtatagccacctaccctggatcatgggtagcctctcagaggctacattcttgaacaatactgacatctcccacccgccccccccccctgcagccatcagttgccaatggctcctcagataagggtgggtctccctgagcccctcccccttggggataggattttggctggcatgatctcatataggtcttgtgcctgctatccttgaaaatctccccttgactgtctgtctccccatgggttgacccagatttctgtgccgtgatctttgtaactctttcatcacttgtaacccttccttccttggttcccagggtcttccgcatcccttcatgtggctgatccctgcgacctagcaaggctaaagggtgccagggaggtacttgggaggccgattttagcagccctgtcctgagaatgcctgctcaggtattctgagtggccttaaccatcccgactgttgcagcaagactaaaacctcccttctctatcatcaggcaaaaaaaaaaaaaaaaaaaaaaaaaaagcacagcttctctttgccttcaaaatggtccctccatggtgtctgctttcaaacttcccaaagtgctcaagttcaccaccttgccctaaatacatcactttttatcctgtaaggcctggaacatggatagcagcagcaaatgagcaccttattttctgccgttagtgcccggtgcgcctggaaaagtcctttgctgaaaggcggctctcctggtgccttgtgcctgtctccctatgccttccttgctcgggcttctggagcagcaggtgccgtctttacttcctcatctgcagtccttgtttctaacccagaccaccaaagccccttgaggaggatttgaggacttttgatccacccatgagccctctgaaacacaagtgcatgatgctctttattgctgggtccagtttgctatttctctgtctcagtttcttttaattaaaaatggtgcgctgacctgattgaagtattcttagccttaacctcaactcatagctgtggtgcgtttgaagcagcgcttgacttgatggcttccctggcctgtctgtcacacgtggaatgaaggagacaaaatggcaaaaatggctgagatgttggattggagcagctttattcaggatctattagtatttgagttttaaaagcatatactcaaagtaataatgctatcctgaatctcagggattataaaagaaatcagagaacactggtgaaatctgataaatgcttgagattttattaaaaatgaggatccagggctggagagatagatggctcagcagttaagagcactggctgctcttccaaaagacctagattcaattcccagcacccatgtggcagctcacaactgtaactcctgtcctagggactctgataccctcacacagacacatgtgcagtcaaatcaccaatgtgcataaaataaaaaataaattaaattaaaaaatcataataaatgagaagccaatatcattttttaaagttgtgatatgtgagacttggttatctaaggtgtctaacgttacaggaggggaatctaaaattattcagaaataaaaggtttatttttagtgatagcaaatatttctctctaaggtgacttgggccacttctatttctttggcagtcagtatattaaagatttgatcgtggaaacgctgttaacatgaaatgtggctttatgcagacatctgtacctgtctaattgcagtttagtgtcctcgctcgtggtctttcttctgtttctcccgcatctacaagttagttcctcattcatgtttcaataagcactgatactggcaagtacgggcttaacctcaaggaaaagagatgaatccactctgcagtccgagggtatgtaaggtgggggctggagatccgcagaccggagacagctagcacatagcgcaagcacaggaatggcgtatgctccctaaggcatgagtgccaactgagctggtctatggggagcactctgaaggtgacgcacccctgctttcaacacattgcaggcattgggatgaaagtactgacgctcatgtaggtggtaaaacctctctatctggggcatttggggagtgagggagctactggcctgttagctcagcacaaggggagctggtgagtgggcctagggtggagcaaggtgaagctgggcaactaggaactgtcttaggcctatcacacccaacagtgccactcattgctgggctaagactgggccctcactctttagagacaaaacagcaacagaatccccaacctaagcattttctccctctttactctcatcaattacagcgtctcgggtgcttcctaaaaatacagtaactctgacaaagatgaactttccatgaaaggccccaggggttgggaacactgatgtatttttgagcttatataggtattaatgctcaataatgatttctacttaggcaataacacaaagggcaatggttttttttttcacccctgcaaaacagtgagacatgatttttttccctcttctctattcacagggaagccaatgtccaaaaccacttcctaattttaaaaactctgtgctgaagtgagtgatgctcctctcaggggggtggggggtgggtttcttctctttaagctttctgacaccatggtctgtgcttcagttgggaccaagaataaacatgcatctgagtaatttttatcggtgtagtgtatccctaatttttactaatgccccttgatttccttatctgtttgtttgttttgaggaaaatgccagttttcacattctgagtcttctcgcctttgctagaagctgccaagtaggtaggtgagagtgtgatttggctgctgcagagctgaggacgaacttgacagaagaagtagaatattctcccgcagtacaagtggtttcagagcttgcttcagacagaagatgatatatctgcgtgtgtggtcactgattggatcctggcatgtaggcttccctgccctggatgtctacagatctcagcaccacttagtcatttgctctatgctgagcctttctccgtcagggacgatgctataggctgtgagaaatgtcacttatggggtaaaggcactgtggtgctatggcaacttgtacttgaagaagccaataagctcagcttgacatccactttctattgtaaagtctaaaccatatgtgtaaccgttgtgttgttaaattagtttacacatgctcactcctgcacgtgtgcatgcatgcatgcatagccttaaagagagcgcaatgtctgcctaaggcttgtaaacacttggctatgacaatcagaccatcctctttgtgactgtgagacgttctcatctgctgcaaagcaagttagatttcagtctgggagatgattgacatatggaaagtgtgtttcgggtgaaggtaacgtgcatttcatattattcacagcatatgagaaattgtaaacataaagtgcaatatattagcaaacagcctggggacaatcaactggctggtaaagaccccattttgggggaaggatgtcagggttacaggcctcctgggcatggggctgaatcctctgttttcctggagtatcttaggcgtgtatttaagaacatagtatctggcatgcatttgcaccatcccagaggcttgcagcccagataagctgcaccctgttcagtctttattatttgattgcaggctgtggaggaattgtagctgtctagttctcccttgggttatctgctgtacattttatgatgtttcattgggagatgtagcatggattttaaatgtaacatctccttctacaaaactaaagtcttcttggaagccggacaaaagtattactttgaatttggaccctcaagttattttattactgtctgcacgtgggctgtttcagagctcactgatgtatggaatgtacccatctggttaatataacaaatgaggaaccaggatagactcacgtttgtgatgacagtaaccaacggggcggcttttgtaagttactcagtggttgctccatgccgggaggtgcccatacttggtttggattggctgaagagaaacagtgggtccatttcagcagaaaaaaatactgacgattcaagtcttgagcaaaatgaatggcagttggaggaattcccagctgcacatgtaaccggaaatgctaaactacccaattaatcaagaatggatgaactcagtgaaacacaaaatttaatcagtttgtgtggcagcagagttgaaaaattgcacgaaagcatttttctctctattgactgcaactccgagtggtccgtgaggtgctatgcaatcctggagcgatgcaaaaaaaaaaaaaaaaaaaaaaagtttttgtactttcttttcattctccttcatttctacaaatgtttgttgttgcctcctgtgtaccaaactcaccttggggatacagcgatgaaaaagagaagcccacctgcctgtaagtggttatttagcatgcatgcaattcagcacaacttgggctggagagagcacttgctgttcttgctgcttttgcagggaacccaggtttggctcctagctgtaactccagttccaggggatccgatgccctctcctggccttcatgaacaccttcatgcatgtggtacacatacatacattccattcacacataaaataataaatgaatagatcttattaaaaaaagaaaatacaaatgaagggagatctagatcaagagaaaaactagaactcagctctgagcttcctgcaggctaaagtgaaaaccaaactataaataatgtattgttttccacagagaaacaatataccaaggtagatgaatgtttagttttcgttatctctaacccagggctttagcattattatagtctgggtacaagttgactggatatcaatcagtctttcacatttgtcttattttttgtttgtttttaatttttttgagacaggtcttggtatatggccagacttttcttgaactcttgattccccctgcctcaatcctttggcactggagttacagattcctgctgccacctctcctggctcagccttctgtgccctcaggagcacacccataggagcttctgagtgtgtccagtgtggacattctcagcgccatcatgtgtgagatgttttggctgtggagttcccatgtgagctgaagctggccttccattaaaagacaagcactggtgtccacccaagagagcactgccgtcttcagctctgtttcctttagtcaggaggactgctcttccctgacacggtttctgctaaatcgcacgtgtattctacaagtaacgtgtctccctttcccccacactcggcatctttacagcacgtcacactagatggagaagggtctgtcacggtctggtattggcacagagcgagagactgttcagtaatgccgagctccctggaatcatgtggggggacaatgacagcttaaatgagaaaggcgtgtgtttcaaattcttattctcaatacgaccgcagcctccacacacagagacattttgcttgtccgtcattgtcaacttttatgctctctggctataaataactcctggaacaactatgcagccacatttcaacagcagttttcaaaactcaagtcacattcttttaaaaatccttcaggatttttttcaagcaagaagggattttttttttactcattttaatcttgtttatattacttaatgtcttgaattcacatggcataaactgaaaaaaacttttcacagaatacccaagttgaataagtgatgattgggcaaacttgtcagataaaaaattcaacattttataaccttcccacctctccatttcttgagttagctctgacatgtttctctgtgtcttagctggacagtgtaagataggtcaaacactaagaacagtttatccatggacttaagatagtcttaaaaactgtacaacagagatggtggctcacagctgtaatcccagcctttgggaggctatcacaggctgacttcaattcaggctaacctggactgtgtaggaagaccctgactcagaaagaaagaattaagacagagcaccaaaatatcttcacgtgaaaaacgacccaatttagaaatgtggattttttgtattttgtcatatgaggtcaactaattcagaactttacatacactgggcagtgggtagattgcacaatgcccaacatggtatcaaacacgttcatatgtcctttagctaaagtttctgtcttccttcttctctttttacactgccagcatcccattagtctcccagacacagtctactgaagtcttcccctccgagtagcactctctcgtgcctgctctgtgaccttagattctccttctttaactcaggtgcagtaacaccgtctactccctactttctgccttcacatgccttctcctggcttgcaacaattctttcctttctttctttcttccttctttcctttctttctttctttctttctttctttctttctttctttctttctttctttctttctttctctctttctctcgttctctctctctttctctctctcgttctctctctctttctttctctctttctctctttttctttctctctctttctctctctctttctttctctctttctttctttctttctttctttctttctttctttctttctttctttctttctgataccatatttcagcactgaattgctttgttttgtgagcacatctcagactttccacttgactgtacactgtttaagggcaagaaatatgtcttctaatctttagtatctataatcctgaccctccccattctgaccacagaaaatgtggccatataaagctgacaccaaccccagatttccttttaaccaattcctcttattgtccccaaatttaagacaaggcatttaattttgttaacttttattgagtccacacctctatttacttcttagaagaaagtcaaaatggtgaactgacctcacctaagaaacagagagcagtggtcatctgtgtacctgagatgtgtgtttgcactgcactgggtgagcaggcttccagctctgtgcattagattgaaatgctcatttctagaatatagctgggcacaacagggagcactgtgtccaaaagcaaaaatccagtcactggcagccccaggattccaaccaggctgtaactgaggtgctcactctatgctaactcctgtgacctactgttcccgctttcttgtaaaagaaagaaagggagaaagaaagaaagaaagaaagaaagaaagaaagaaagaaagaaagaaagaaagaaaggaaggaagaaaggaaggaagaaaggaaggaaggaaggaaaagagagagagagaaagaaagaaagaaaggaaggaaggaaggataaaagaaagaagggaagaaagaaagaaaagaagagagaagagaagagaagagaggagaggagaggagaggagaggagaggagaagagaagagaagagaagagaagagaagagaagagaagagaagagaagagaagagaagagaagagaagagaaaaaaaggaaagaaaagaaaagcaatctaatgaattgtaagaaagcagagtttggggattctaagccaagaatgacttgtgtagaatacagccaggtttatatctcatggtgtgctgcagtgtttcaggaaaaagaaaaattatcagagtaaattcaggtcctggtttctgtcccagcttcatttccatcaataatttcatattttggccaaacacatttctaacggggggggggggggaggtttctcctctctgaccaccttttggaggacacagatattcaagccctctactactgattcagaaccttggccccctttttctttgttttggggaggagaacagggtttcattaagtttgccattcttgaacttactctgtatcctaggcgggccttgaacttgctatcctcctgcctaagacctggaccactaattcctactcactttggttaccttactagtgaatgaaagataaggcagataatgcagttcagtagtggcattctggtgagcctgacgtgagtgtgtgctctaactcctgctactctacaggctaaggtggaaagaccgcacctttgaggccagcatacggagacccaagctacactggcttccaaaggaagactctatcacaaacaaacaacaaaacaagcaaaccaaaaatagttgagtgcatgtgttttgatatcagttccaatgaatgcttcctcactgagtatggcaatacaattcctggcggttagagagatggttaagagcagatctttcagatcactcagttgcctgaagtatagtgtcttagccttcccagatggccactgggtaactcaagcaggtggctagttctcaaaagaacataatggtttgccagagggcacatggtgtgtttaatgattgggaatttattctagtgggctgggcgtggggtggggttaaattgcctttaacctcagagacctgctaatccaccaggctacagaagctctgctgggcctggttaataggcaattagcaagagcatgggggggggggggatcagctgggggttggccactctatattggctacatgactttaggcatattgcttagtgtcattaagctttgtttacttcaatgcagataataaactccacttctcaagtttttatggtggctaaattagatagtatctgtaaaatacagcattattccccatcaaagcctcatttcctggtttccaaggttaagcttggaatgagttcctttccactggcataatgaggccaacactaagaacacagaagagcagataggacagaaaagcaagctctgctttccttccctcccatgtgagcccacaaggggaaagcagggagccctccaaacctcagatgcaatcagtacctactgataggatggatggacattacaaaatgccgtggaagggtcaccagactgcaagaagaactatgacatgaagctgtgttcttccctgaaagaaactaggagtaaggttattagttacctggaagggcatttgatcaccagagattgtctgtgaaagggacccaccacatctgcaggtattgcaaattactaacttgtaaaataatttttgagattttttttgtttgacttattgttatcatgtgtatgtgggtgtttgaatcagtatacttcatgtgtgtggtgcccatgaaggtcataaagagggcatcagatcccctggaatagttgtaagccaccaggtaggtgctaagaattgtgaacatgggtcctctgcaagatcagcatatgctcttaaccactgagccatctctccagccccccaccaccaccacaaatgctgtattttaattaaaatagaacacttgtgccttaaacacccacagtaagttttagatagtactcagaagactgttagctgaatggagaaatccgcactccgctagggacttcttcatgaggcctttcttccccacaaagacttggctagtagagagttctggggcacccagcctggaccctgcgaaaaaaaaggagcgggaaacactgtacaaaagtgatgattagttttaattgtcaacttaacacaatttgagaagactgtctcaaagaggggttgtctagctcaggttgcctgtaggcacaactgtgggagattgttccagtttggagaaaaaaaaatccccttctcatagatctggctagtttctgcttccccagatggagatgtgagccaccatccccagatacactgtttgtagctcttattgtacattattcccccccccccattccggtcactgtattaagtgacattaaagagttcaggtactttactaagaagtactttggtgggaacacattggcacacttgtgcacttttctttaagaacacatttctggccccatatgtattataaagcagtcttaacgaagaagtgacacccttcctacagtatgcaagcttctcgtgagttgtcttgttattccacagcatcaatgaggcatactgctggaaagcatatctgctacgtataaaccattgcctctgtcaaaaaaacacaatgcaacgactttgtgattgtttgcctctgtcagaaagcccagtgtaaggagttcagcttattggttttactgtctctctctctctctctctctttgttcagttctgggattgggcaataccttattctctaagacagaacgtgtgtgctgttgatctgagcagaggtggggagcttcctggggacagaatgaagaatgaagtagaagctaggaacagagggggcggggctcttcagatccctttcttgtagaggtttacacacagaggacttgctcatcacagcagctaccaatggctgtctgaggctctgctttctttttctccttttttctcagacgcctgataaagaaacctggtgtctaccccacggccccgagccttccctggatgacttgtttggtctgggctgttgggctttgtgcaagagcttgctccaaatcagtgacctacatactttgctttacttttcgagatgaaatctgactgtgttgcccagactggcctagaatcccagggaccaggtgatcctcctgcctcaggttcctgagtagctggaattataggtacatgcctatcatacctggattgacttcctgtaagtgtcatgatttttcatatttaccatttatacatatgactctgggatactccccctctagggtaaatttcttcaactagactatcatagttatttttgcctagttacctctaaattatgctagtgctctgtgtgtgcgtatgtgcgcatgtgcacatgtgtgtgccaattcccattcatgcaagtgctctgcccccttttccatcagagcctcagtctcatcactcctccagtgacaaagtccttgttgaatgtacagagcctttcaacttttgtttttacttagcaccactgagtgttttttttccttctcttgtactgattgattgagcaacatacgcacacgtacacactgagtatcaaaaccactttgtccatataaagcaacggtttttttttttgttctttcccccaagttttatgttgagttggttttatctgttaccagcttgaccctcaaactgtatcatttttccctctttgagttgtggaaccaataacaagaggaagccaattgagctgtgaaagagacattgatccttggccaagaagcgaaatgtgaaataatctcctcaaattgacttttccaacccctgtggatcacgaaattatagacaagagatgaaaagaagtgaggttgtgaatgggttgttgtcgacttaatgggatttagaatcaccgtggaaacaaaccttcagatatgtctgcaaggaagtctctagattgggttaagagaggtggaaagacccaccctaaatatgggtgattccattcataggctgtggtcccaactggggtcccttgctaaattaagaggagaaactggcctgagatgcagcattcacccttctgtgctccatggatgtggatgtaatgtgcgcatctgcctcgtactccggccttgcccaccacgatgggttgtatgctcaaactgcaaatcataatacatccatctccctctagattgcctttgatgggttatcttgtttcagtattgagaaaagtagctaacacagagcagggaaagatgagcttataagggggaggaatattcatgtcacttctgggaacctatgggttggggggttagcttctgtgctttttccttctttttgtggttcttcccagtggcttccatgacaactgtcagctatcatagaactggagggcttgtcacttagcacacagatggaattataacgaagccagaggtcatctggtagtcactctggcagccatcgtagaaggaattggttttgtttgctgcatctgaagaggaacttttgacctgtaaggatctagtcacatgattgaagtaggttagaggttcatcttgattatcgaggctggactcagggtagcaaggccagtatcaaagctctatgctgccgggttaaacctgtaaatctgctggtctcatctcagcttctccttttccagatgcttcaaaggccacagaggggaccatcaccccctcctttgacccgcctgccattgttccatggaccagtggtagttagttcagattcttgtgttttgctccttcaatgggtctcttcaaactcttccaaagaaacaccatctgaaaccagggcaattacaacaatcaccaaactaggtcaaccgaccttataacttgttattatttttcttttaaataagttatgtaaaaaccatgattaaagattttactacttcacatttcacaaataaaaaagtaaagatagatattgtgttttacttatttctagagtgtgtatttatatcggctttctatataattttattgtagttatcaggagtaatatgtaaggctatagtgtgaacactgtagggaagttatcacttaaatggaaaaataaagacctgccaactggggtggtacatacctgtaatcccagcccttaggggaaggtcagaaggttgcaagttcgaagacaactagggcaacatatcaaggtcttggctatgtaaaatgactttgtctctccccaccaaaaagcaagctaagtgtgataccacatgcccataaccagcaagagactgaggcaggaagattatgagttccaaattactttgagcaacgtagtattgagaacattcctgaacaaacagggggctagagatacagctcaaagtagagaccttcctgacttgtcaatggccctggcttttcccagagttgcatggcacttctatgcttatcttagtctgatctgcttaggtccaaatgctaagtcatcgttaaaatagagactaatgaatcaacaagatgggtgtcaccatgacgatccattcgggaaggagatgagagagaatcagcaagaaagagagggagacaacctgcaaagaaagaggttacccaaagcctttttatatattttgttttgaagtggttcggtcactcacctatcctgggaaatctagacaagacaccaggacacgagtgcttcttctgcagtacagaaaaggacatagcagagttactacaagctcagtggggagaatagactcaaagccatattctatgaccatatcaatagaataaaggctgctaggaaaatgctaattttttactaagttggagattcacttgtctgatgtcagacaggaaagtgacattttgagtgttttctatgcttcccacgatatgacagccctcagttacacatggaaaaatctaacggctcttctctcacatagcggccctgatagcaacaggcagatgactggtatccatgaatgggcagctgccctgattattggatactgacaactgaagaactgtgaagacctacaggcaacattagcaagactccatcgtagcattttacagccaagcatttgtagattatcgctttccttgctttaatatgaaatatgttagcgatatctaactactaaaattgctcataaaaggaagcttatttccactttaggaggattaataagtaactgggtttctgagcctagaggtagagcggagagagactgaaatggacctgggcttcttttgaagtggtagaaataaatgttctaagattagaatgtgctgaaagctgatttgtaagtccattaagtcattggaatgtgtggatttggggctggagagatgactcacctgcttgaacacttgttttgtaaaagcccaatagcctgagtttgaacccccaaaccatgtaacggtggaaggaaaagaagccaattccacaaagttattctcatcttctaacctcaacagtatgcaatagtatgcaagtatcctgccttatccccacatcttacacacgcgtgcacacacacacaaatacatagacagagagacagacagagacagacagacagagacttagggagccagagacagacagaggaagacagagagacagagagcagtaataattttaaatggtttaaaatgtatgattttatggtgtgcacattacaccttaataaagtggttgttttttattttgtgtgtatacatgttcatgtgtgtgcatgtttggaagtacatatgtatggggtgtacatagccatgaaggacacaggttgatgatgtgtgtgttcttttatggctcttcatattattattgttgttgtttaagacaggttttctcactgagccaaaccttgagctcaccaagttgtaagaatggctggccattctagctgtcaagctcgagtgagctccaggaaacctttctgtctctcagctacggctttgggacagcaagcatgagctgctgagcccagcaatataggtggcttctagagatctgaattcaggtcctcatgtttgcaaaacaaacattttattaactgagcctctccctgttctataaagctgtttaaaaggtggaagatgaatgggggagaagagaggaagaggaggaagaagagggggatggggaggaggcagtggtggtggtggtgtgaaagaaatagtatatcctagaactctgggaaaaccaaaattttactgttgaaagttattctcaaattaaaggaggcaaagattaattgtttccacttcctgaatttttcccacgatgatgagaaacatgatgttctgtctcaagtctgacaccaggaagctctggcttgtatgtgattttccctgttgcaaaaaaaggaaatggactcagaagcttctgaaggcttggcaaagccacagtcaatgaaacagaataacggatactcagtacaccggcccccatggcagcttatctgcctccacctcatagcctctcggggatgcccttctgcagttagactatgggtcacttcccttctcctggggacaacacttatatttgcaacatagcccatttgagatgtagccctattttagatcatgcgataaattgcatgggacatccctcacctattttttcaaaataattttccagtgtttctatcagccttttgtattctgtattccgaaaggtttgccagaagggtgaggcctgaatatttcttacagtattgaacacaaagggaatttggtcttcatggaaatagaaaggcttgtttctttctactgatgtctatgaagataagactttatttcttcacttactatccatttgttctaagatagtgtcttactttgttacctaagctgggttgagtctactaggctgaaatgatcctcctgcctcatcctcccatgtcatggggattacagatacacagcacagtgcttggttaacatgtatgcttctgtgatgttttaaatggcttgttctctcttcgtctctttccctcttcccttcttccctccttccctccttccctctttccttcctcccctcctcccctccttccctccctctctcactcctctcctcactggacatttgaagtctacagttgctctagttggttccttggaagatctaaggcagtgggtggttctcaaccttcctaatgcttcagcactttaatacagttccagaaatataaaatgactccattgctattttattttttttccattttttattaggtatttagctcatttacatttccaatgctataccaaaaagtcccccatacccacccacccccactcccctacccgcccactccccctttttggccctggcgttcccctgttctggggcatataaagtttgtgtgtccaatgggcctctctttccagtgatggccgactaggccatctttttgatacatatgcagctagagtcaagagctccggggtactggttagttcataatgttgatccacctatagggttgcagatccctttagctccttgggtactttctctagctcctccattgggagccctgtgatccatccattagctgactgtgggcatccacttctgtgtttgctaggccccggcatagtctcacaagagacagctacatctgggtcctttcgataaaatcttgctagtgtatgcaatggtgtcagcgtttggatgctgattatggggtggatccctggataaggcagtctctacatggtccatcctttcatctcagctccaaactttgtctctgtaactccttccaagggtgttttgttcccacttctaaggaggggcatagtgtccacacttcagtcttcatttttcttgagtttcatgtgtttaggaaattgtatcttatatcttgggtatcctaggttttgggctaatatccacttatcagtgagtacatattgtgtgagttcctttgtgaatgtgttacctcactcaggatgatgccctccaggtccatccatttggctaggaatttcataaattcattctttttaatagctgagtagtactccattgtgtagatgtaccacattttctgtatccattcctctgttgaggggcatctgggttctttccagcttctggctattataaataaggctgctatgaacatagtggagcatgtgtccttctcaccagttggggcatcttctggatatatgcccaggagaggtattgctggatcctaactgtcattttgttactgttgtgaatcataatgtaaatatctgatatgtaggctatctgacattgacctctgtgaaaggattgtttgagccaccaaagggtttgtgactcccaggttgagaaccactcctctaaagtgaagcctgcaggacagtacatctgcttaaaaacttttgagggactagtcactaagacctgccacatggtagaacaataaattagtgttctccatccatttaccagtgctggctcatggctatattggcgttaaaaagaaagttaagacaatcaattttcaacctatttgcaaatgtaaaatagctcatttggcatgtagccccattttagatcacttggaaaactgcatggatcatttctcacccatttttacaaaatgattttttttaggatttattttggtgtggacaaggtctcatagtgtagagcaaaccagcctggaacgtgctatgtagttcagactcccttcagtctgcccgcttttctgcctcagccttttatgtggtgggattacagatgtgtgctagcatatggcaggttaattatgtattcatcttcagccctgtcccacttacatactactctttccctttgctgtttttctcattatttaagtagttagtcagacctctgggcaatctccttcctacctccccaacctggaggcccctgctgcatttttgaacttgtcttttaggctctccctctcttcttcctccgtcccttcttccttcctcccaccttccatctcttctttcctccctcccaggacatgtttatacactctttcaaccagtttaaataagatttaaaaataaataataatcaggaaagaaaccaagtcagtacccagccaaggaagcactctcctcagccccatctaggcttttagtgtgggatttctgctgcctctccaactctgagagacagctatgatagtttccctatttaaaatgtgaccctggacacagaatgaccggggatgaaacagtggctgtggaggtaggtatcagcgcgcttgcaggcttatggtggtctcaccaacacagaagcaagcaggacctgccacggatttggcaatgtagaacttactaacccgtgctggaatgtttacaatcctgttcacacttggaaatgtgagcaggagtccttgagttactttctttatgctcagaaatgactgggtgccaggatctgagagtcattaaaggtaacttcaggacagaaatgtctccttgtgatgagattgtctccacctctgccccagtggacagcctgctgtcctgggacccacggacactagccttcgccaccccatgctccccaagcatagagggtacctctttcgagggtatcctttctggttactttgtggttcgtacatccagagcagcccatgcaacacagtaccttagggtgggctctactccagcaaaggattaactaaggctgactacaaactctctccattcatttcagaagtatgtttccttattcttagtctgcattttatgaaggtatacctaaatttggaaaggtgtattccaagagaactctgttttgaaggatttcaaggaaggcctctttttagacaaggctgaaagtcacagtctgctttctatcccttttgtggctccatattttttcccagtagatttctcactgaggaatttaattctaatttggttaacaggcaggccttcctctatgaagggcactttgaaaagtatcgtgtaggggctggtgagatggctcagtgggtaagagcacccgactgctcttccgaaggtccgaagttcaaatcccagcaaccacatggtggctcacaaccacccgtaatgagatctgataccctcttctggtgtgtctgaagacagctacagtgtacttacatatagtaaataaataaataaatctttaaaaaaaaaaaaaaaaaagaaaagtatcgtgtaagcccatgggtttggacacattgcattcgccacagcccatttgctgcagaatacatacaataagaaaaatggctatacttcacacaacctagtttgcatgtacgtgagttgaaaaaattattataacaactccttttaaaaatctgtgtaggcctgggacagcactagtaaatgggaaccagaaagctaatttattgttttcactacggggtgggacttgtagcattttaatattaagcacagctaagagtgcggtgcgaacccactgagtctggtgaatgaagtgtttcagtcatctatccctgtacccttgtgacatcgaactctaagcgaaggcgggtcacccagtgcgtctttctgcattttgtgctatgaaatagataatatgggaaatgcagtgtggaggtagcacgtagaaccaggactcactagactccctaaaagaaccacaagttattagtctaagatgccagggggtatgtgctgggatttcctgaagggctgaaatagtgccctctcctgaggcacaagctgcccctgcaggcaggcagcaaactcatatagcagtctctaggtttggaaaaatgtctcagaggactagagctggtcaactctttctagttgctattctttctttaaaatgatggcaacaatatcaacaaccaaaaccccaaacaaacaaaagtcattttgtttgttttctgagcaggactcatcccgctgcatgtgtattgaggtcagaggacgattgctggagttgattctcttcctccatacgggttctgtggcttgaactcctcagattgtcaggcttggtagcaagtaccttatccactgagccatctcagccagtccatcacttcttaaagtctctcactcgctcttctctctatctttgtgaatatgtatgtgagacacgcacacattcacacacacacacacacacacacagagtggggagggggagggggagagggagacacagagagagacagagagagacacagagagagagcccgactaactggaaatggaacacagggcctttgcacacgtttggcaaagactttcctactgagctttataactctagccctttattttacttcttatcttgagacagggtcttaataagtcgttcacgttggccttgagtgtactgtatagcctaggcaggcctcagccccctgaggagctgggattacagtctataccactaagcctgactcttgtctcaatttagtttttgcatgtgttcagtagacagccaattctccactgaacggctagatctatgcttttcaagactgtctgagtttgcttcatcaaacatggcaaacaaataaccagttctctcagaacctctgctgtgcaaatgtcatcatccatgcaaacaccgcttctaatgccagctcagggcaatgggttgccgttcctttgggagctaaaggtgagcctgaagatttgggttgtgtgtgtgtgtgcgcatgtgcaggttgttgtcatttggttttctgggtttggcttggtttggttttgtagggtgaggttgataacttttaaagaggatccctcagcttgctcttgtcctagcatggacactgagtggcactgggcattcctcagtcctttgggggtgtccgtcagagtcggtggtgctgatgatcagagcaccctctgggcatggacttcagctgtggacatccctgttttcattatcaagtattttttttctcttcactgtaaacattaaccctacaaataggctaccacacggcaatgtctgacgttttgatgacgaaagactacaagtggtattgacactgaatccaaaacatcattttactaatgggccgtgctgcttggctttgttgcaatctaggcaaactggtgataccaagacgcaggtaggatttagccctcataaacagcctaactttcccttgtcacttatgtgcctaggatgtgcaagcgagaatgggaggcagcttcagttcatgagcaattatcagcttcatacctagccagcaccaaacaagtgtaagagcaagatgtcaggtccttcttactgcagtttgcttcctagtcctaatctatttaaaacatggtcctttatgacatagcggccttccacacaacacagaagcttgactgtatctgcagtaaggcagagtgtgcgcattgaattctatgccaacgaatggaactcgcccaaggttcttctgttaagatggtgacagtgtaagaggctaccttttacctcacttaagccttctgccttctctccccaggggtcagcagattcctatacaagcaggccatcggactccgatgtctccttggaagaggaccgggaagcgatccggcaagagcgagaacagcaagcagctatccagcttgagagagcgaaggtgactttcttccttttcttttaacgcgagctgtcatgttgctcagcgcctgtgcccagcatttctacctcacatctgtcttagtgttcctgataaaacactgaccaaaagcaacttggagaggaatggcttcattagacagctctggtcacactcatcagtgacagagtccagagtaggaactcaagcagtacaagaacccagaggcagggactgaagtgggagctacggagaaactctgcttatttggctagctctccacggtatacttagccttctttctgataccactcagggccacctgactaagggctagactgctcacggtggggtgagcacttctacatcaatcactggtcgggagaatgttccccgggcctgcctacaggctgatttggtagtagcatgtttgtaatggacattccttctttacaaacgactctagcttacgtcatgtgtctctctggagtattcattttccagccatccggctaaggcttctgattgcaaggctctctgttgtttgtgcccctcacagaagttagtggtatctacaggagcctatttcttatgaaccttttgcctttttctgtttgatttcgtggtaattattggtcctttcccaacctagcagtgtggcaatatcaaatgacctcacaacgtattggcagagaaccttctgagcggcgagcctgagccctctgttcttgactcctccccatccttgcttgcctctgttacacacccacccccaccatgctacggatcacttcactgctgcttctgttctgtggtttctagatttcagactcccacttcaacttcagcatggagttattttgtctgcctgtttgtttgagaaggggaccactacactgtccattctggtcttgaacttgtggacttactagctgggctacagatgcgcaccatcggacctggttaagccctttgaacaactcaaacaagagcagcaagacagagtgacagaagccatcactagccaatataggcttcagatcttcttcttccagaagacacaggatgcagcaggaaaccagctgcacagttgaattttaggaccagaattgctactagagctctcccattcctcctatatctttctaacttatttttcaaagcatagataggcccttttggcaaattaatttttatgcccagcaacagcatatgagacacggtttatggctagcctgtctgcttgcttccatagctaactccagtttagaattttagactcaagcccagataacgttaatttccttccctttctggtttctgataagctgctttagagattgaagcaagagaagaaggatatggatgggtgcatcattggggttgagtgtggggttgacgtccacacactgtgtctgtgatctctggtaggagggcatcagcatagtgcctgggaggggacaaagaggtcctactgtgtgtcctacctcaactgttgatattcccagagcaaatgaataaacccatagcaaagctacctagaggcttggagaccttgttgcttgttcttgttttgaaaatgtcccttgccatctgtttcattattgcgtggtcacctaaaacgggggtggcaggaccatagcctcggctggtggctggcttagccccaacaggctgcacctgctcaggagcactttgccagcaggaattcatatgcaaatttaaaacaaccaactgttagaaggtaggaagagggtacaggtgaagagcctgtgtgttgggtttaacctacgttggcctccattcccctggcatgacaagatggttatctacaaaagatctcaggttttcagaactgaggctctttcaaaaatccttgtcttccacctacccaccctccctcaagtttataacacccaaggtacatttcctagcatgtttttcttctatgtgtagacttgctcctctgtgtgtatgtgtgtgtgtgtgtgtgtgtgtgtgcgcgcgcactcgcaagtgctcccatgagtacacatatgcataattatgcacatgtgtgtggatgtcagaggttaatgtgtttcctaatcaccctccatcttaatatttgaggcaggtctcttactgaacctggagttcaccttttgtctagactggcttgggtcagcaagtgccagaaatcctcctgtctctgcctccccagaactggaattaaagatgcacagctctgcagcccgcttttgtcacagatactgggactctgaattcagttcctcgtgcttgagcatcaagtacttcaacaacagagctgtcttctagaacttccctcccccaagtagacacgtcctgtatcccacagttgggacagtgtctgggacaggttaaagtaaatccacagcttgtaggagcagagagagccgagctgactgccccacctctgtacatccctcccctgtctttttggggctggctccttattgaggatgttaggaagtactgcagaaagaaaatggctgggccgagagcaatgagtcactcccggagtcatctctgcagatctcgggatgtggcctgcaactataaaacccagaggagagctctctctggaaagtgatttccttgttgcctggaaccatcattcatcctgtgacatgtttctataggaaaaatgcttctctctcccgttctctccctcgctcactcctcattctgtacttctgtctccagtccaaacctgtagcttttgcggtgaaaacgaacgtgagctactgtggtgccctggacgaagatgtgcccgttcccagcacagccatctcctttgacgccaaggactttcttcacattaaagaggtaaatgtaggacatactgcacctcatcacctgccaaaaaagctagagctgggagtcagcctgtgccaagcccagaggagaggcgacccagagagctgccagtgtggagcctcggttaacgctctgggcctctgcatcctctcatctcactgagacttagaggatgagatcatcgcctacctgcactgccacgtggtcccagcagtagggcacacccaacatttagaatgatagcatggactttgaattttgtaccacacctgttctctgtctgtctgtctgtctgtctatctctttgtcctgtctctctatgtttctctctatatccttctctgtctctctgtctctctgtctgccctctctgtctttctctgtctccgtctgtctctcttgtctttctctgtctctttgtgtgtgtgtgtgtgtgtgttgggaaccaaacccagggtctagtggagactacagagccatggatctatggatctaacttagggaaacatgagtttggtagcagcagtatccaggagggactttttacagaaggatattatcattaaagacactgagctgtggctctgaaatacttaaagctaagaagggcatagaggactctaggaaacagacagtttgaggggatgagcaaggtaaagaggacttgaggcttcacgtgtgtggaaaggtagaataataaaataatacaacaaaagcttgagttctgtgcacagcccaggcacagtgtagttctgctttgtatcaggcactgtgctaagtgttggaggatgagatataaggaccgctgatggtccttatgggcaaggcactctgagtcttggggcagggtgaatagtattcctgatgtctgtatgtataaaagaaacaactggactcatgtcctgaaggttcacagaaagagtcagaactggacacagagtgacatcagggggacagctgaaaacaccccagcatggccagagagcagtaacagaagtaaaacagaagaggccatgtccaggattcaagacagagaaccttccttttggatgtgctcaggttgaattcagggccatatgtgcaccagacaaacattgctgagctgttagccgtagccctcagggaacatcttgcaccagggcaagaagaccggtccttatcaccagacagtaggctggaaaggagtttggaataaagcagagatgtgctctgccttttgtgtgaggatgagagctgtgatgggcaaggggaagcacctagggctgcagagactgagcagtcactgggcagcttagaggaagggtgaaggagcagatagaagggatttggaggccccacgccactgcatgtagtagagcaagcaagagagggagaaacagagggatggtggtcagcttatttaagttggctggaattataggaaggagcagcagcctctagattcagcttttgaaagagagaaggcagaaaggggaccagatctggcagtgcacggccatgaatttatgtttgaacacactctgtctggggctatccccctcagcacatgagtggttgaatctctctcactattttcttttttattttaacttgataagttttaagttaaaagataagtttaacgttttatttttaaagatctattgatttatctcatatacgttgttgctgtcttcagacacaccagaagagggcatcagatccccgttacagatggttatgagccaccatgtggttgctgggattttaactcaggacctctggaagagagcagtcagtgctcttaacccttgagccatctctccagcccctctattttcactaaaagcaactaagtcatcttcgtgagttacctgccagcattcatcctttcaaaggtgaagcaaactttaagagcaagggacattcttccacacatatgacacagacattccaaccttgcagtattttattgctttttacattgcactagtattctagtttttattaatacttattttaattggacatatttatgtgatcatctgatatgtattacatataataggtcacaatgaaatccgaagagttaacactttgggttctctaaacttaaataaagctttctgaggtagggtatgacattttgaatcatgtatgaagcctgtcctgaccaagttggaataactaatatttgcatctgcacagaggcactgtgtgtggcacctttgagctgctccgaaggcactttgctgtgtcttgctggcagtgtttggctctgtgagctgttgatcaagggattttcctccagcctagcagctccttttccttgtgtagtgtctgagctagtaatcgtatatggctcagagccactgttttctcatcttgcagatcagattaaaaaaaaagaaatcttagaaagagaacatgctaatcactttagggaaatcaagatggagaagactggaacagcgctaaggggcctttccagaaagctggctcagcccgtgggacatcaccaacccagatgggcaggcttctgtagcaggctgattgcttcctgttcagccatctctcaagtacctttctaagtgctttcttggcctaaaggtcaagaatggggctacaacagtggaggttccaaagccaaacagagggcctcatgcttccactctgcaccacagtgccttgctccccaggggccggagaactctcacttactttgagtaggagcctctgtgttctttagctgtttcctagaactacgggaaaccactttgggaagttgtattagccatcttaggcaacgctgtaaggccattggggtaccacttaactaattagtatcctggtgggctgacttaatttcaggaaataactgaagcctcaggaaactatgactcatggtctgtgttattcctgccacactagaatgtaaaccccagaccttatgcaccaaagatttcaaaagggccctcttgccttttcctaattacaaagtaaacaggcctgttatttcaggtgtgttatcctgagttagtcaggaaactaagacccagattgctcaaagttccctatccatcagctcacactcctttcaactctgactctgattggcagggagcctggctgatgcaggagctctgagcaggaagggttgaagcctgccgtgtcactgtcatttcagtgtgagattgttacttaaaattattcaaatgccatgctgtgatgactcaatgaaccttccaggcttccttctcacattgtcagtactggagatatgccaattccactttcttcttcttttttttcccctcctctttttttttttaaattaggtattttcttcatttacatttccagtgctatcccaaaagtcccccataccttcccaccccccccaccccccatacactcccacttcttggccctggcgttcccctgtactgaggcatataaagtttgcacgaccaatgggcctctctttccactgatggccgactaggacatcttttgatacatatgcagctagagacacgagtctggggggtactggttagttcatattgttgttccacctatatggttgcagatccctttagctccttggatactttctctagctcctccattgggggccctgtgatccatccaatagctgactgtgagcatccacttctgtgtttgctaggccccggcatagtctcacaagagacagctatatcagggtcctttcagcagaatcttgctagtgtatgcaatggtgtcagcgtttggaggctgattatgggatggatccccaggtatggcagtctctagttgatccatcctttcgtctcagctccaaactttgtctctgtaactccttccatgggtgttttgttcccaattctaagaagtccactttcttctgaactaagtaacttatcttacagttggtatatatttcaacacacacagacatgcacacatacacaaatacacatggatacataggcacatattcacacacacatatacacacaaatatacatattgacacacatatacgcatggatacacacacaaacacacatatacacatggatacacacacaaacacacatacatgtacacatacatacaaagacatatagatacacatacagagccacacatatacacagaaacacagagacacacacatacacaggcaaacatacacacatacatacacacacatatacataaaacacatatacacacaacatgcacatgtacatacacacacacacacacacacacacacaaataaaatcaaagaaaataagtttcttattcctggaaggtttaaatgatataatttttatctattttctagaaattaccagtagaaacattcccttgagacaggtggcttagactaaacttctgtctgccctgggctcagtaaatcaataattgccaatataatttttctggcactttggctaagaccttgctgatagatggttaccctatactcattagagtcatttgtggacttgtgtccctagttttgtacgttatgaaaccaggaagaaatcgttcaattcccttaggtctaggccatagattatttccaaatcatatctacaaacatgtcatttgttcggactttgtaacttttggactttttcctcaaagaatgggctatgccttcatttgaaatcctgcatttgaatgagagtctacagtaaacagtatcctatgaatttcacctgagagctgttagtgaatgactgtccttcaagagttttacacttaacatgttgttaccattgatacaaactgtgtctggtgggaccttttgtctcgaggactaagtaggccttcttgaaagaactgaatgaatccagaggttagaacctacttttgataagggctgacaaataagagtgcacagggttctaactgacccactgcctctgccataaagcaacttacatggaaacacagcctcttcaggctttgtggctattttcacagtaggacagcagattcgagtattatagtagagagtgcatttatcatttgggcctttacaaataaaacccctgaagaatcctcctttagtctgtgagctgaaaacatttcctacaaaacacaaaaccacgacctttgtggtctctatgtcctgtgtgcactctgaggcgtagtccacctgacggtgtaacattgtatccttcacttccttggagttaactactgagatgtgagggtaactgaattactattgagggtagctttcctctctgctttccagaaatataacaatgattggtggataggaagactggtaaaagagggctgtgagattggcttcatcccaagtccactgcgcttggagaatattcggattcaacaggaacagaaaagaggccgttttcatggcgggtaacaccccatcttttttatgagctaaccttttctcctttctccctccctccctccctccttccttccccactttttggtgggaaaattgggcaatattgtcaagttgtttttgtttttaatttaaaactggataaagcagtttattcttttgactcaacctctgttttctgttggattctttttttcattcaggaagttgggttctttccaattctctttgctgggaccccaatgaaaacccgcttttaaagcaaagagacactcccctgcatacatgctattcttgaggaggatacaaaggcttcaggtttaactgtttccactgtgctctgacccctagctccttagaaacccacgtgaattccacagtactcagtaaacccatctccaaaccctgttttcttctgtgagagtcacacagggcctcacttctcaggacagctcaggtggcagctgacatgacctagagttggtgttttgcttgggtccctgtcaaagactctgtctggtgggctcagtatgtggacagtccccggggtcccttcctctacctgggctcctgtgccatcttctgcttgccctgtgctgatgacaccagggagctatgacagactagcctctagtgttcaaaagaaacggtgtgccagtggcaggtcccagcagtgtgagcacagccggagaggagtccaagccacacagacccagtgctgcttggatgccgtgccgctgctctctgtgaagcgccaatttcatatatgttagaattcttcaaaagccttcaggcagagcaagttctgctagtgttgtcgtcgttttgagacaatcttgatctgtagtccaggcttgtcttcacaactgctgaggcagttctgcaccagctccatgccctattgctagagttgcagcttcgtgtcaccatgtctggacgaagccatctcttgccccaagctctctttttcagtttgattttttttttcaagtaagaaaatacctgtgttatttaaggttacctttgcttttatcctaatggaaacctttccaggataatggaagaccagagaagtacaattaacccacccttctaatgattaatttgtaaaaatgttttattattaatcctcttgttccctttgctctagacagttcatcccctctccttctcagcacactggcaacacttggcccttcctggggccgtggcatctgccactgcctcctcctcctcctgggcccctcttcctcctttgtgttgtctcttttaggcccctgtggcaccactccagtgacaccttccttccccaccatattttaagttgtactcacccaggaaccaccctgtccctgtattttccatctctttccaacttaattatttctactacacttaactactctcagaaatattatgtatttatctatttctcttgtgcagccttgattatctcctactagaatatgactcctcgtttctcaccattgttaactgttagtacatgcatatatatgtaaaaatatatagttttctttgaggcaagagaaacaataaagtcctgggctttattcgcagaggctcatttgtcacgttcctctctgtagagtagagataactcctatgtccatagatggggaaagctagtactcaaagatatactgcagtgtgtcccaccatcctgccagtaagtgtcagacctgttcatgctgcaatataagcataactgaattcctatcgatagaaccgtgactgtggacagcagaacaggccatggaacaccctcccacacacacttttaagaagttctcccgtcttcttgcttgttctgaactgtctggcctctggccagcactttgatgactggtctcaggtaaacgcagcactctacagagcacccttatcagggtctctgagtctttctgctcagttcttgtacagataattgggatagataattgaccaagtatttccaggtctcaatttgttctccactttctctgagaaacgaggtcagagaaagcatttgagaagatttttcccttctaacacgatttggtatgttgtgaattatttagtagaaggccaaagaacgccttggattctcagtttctgttttcaggggatctagagagtgagtcttaagttcctttccgtgttctaggaaatcgagtggaaactcttcctccagtctgggagaaatggtatcaggaacattccgagcaactcccacaacaacaggtgagggggcttgctaacgctttcactggtttggaaataaagtcttgatttaagatttaaagatgtaaagcttcttttatgaaaaatttccttgctcgtttgaatgctatttgatttggagagtactaatgatataagaatcaggtatagttttgaaaaatctcgttcacccccctatagccagtaactctccctgtataaaccaatctcaagttcattattttacccaagaactcaagctactttaagattgtgaggccaatagagataaaagttcctgaactgtcacagcaatgtacatcatgtagatgaagctctagcatgtgttgggcccaggttgtacatcctgggagggatatagcctcgctgcagccaagatgactttgtttttatgtttggacatctggcaattccaggtgagccctagagttaatgcaacagagacagggtatctcaataaagactgtgtgtctttggaaattatgaagatcttcaccgagaaagtcttcttctatcacattctctgatgtgattctcctataagctaacttcattctggccaggacatgtggtagattcttagtacccaacattaggctatcacactgcaacatatatcaatgccaggcagagtctgggacagctttaggtggatgcatgtagacaggacctgctgtttggatggcagcaaaaccacctttgttgattgtgaagtagatttctttctgtttgctgggcactaggcttcgtcaccagcttttctcttaccacctagaggggagagggggagctggctgtccaagagttgagaggagcatagtagaaacagatgtgtcaggaggaacagagaacatctgctatattacctctgggtttaccaacagtcacaaataataagacagtaacaataataagaatgtttgagatgataatgatttcgcttacattgtatcatttcttttttctttttcttttcttttcttttttttttttttcatttcgcttagctagcttgccctcagctccactgtgaatagcacacaatgtgggcacacgcatgcttaatgattagctaacaacctccagtgctgtttgagtgcccatccccagcttctaatgggaaagtcatcggtacagagaggaaggggtctgtatttcatgttctcacacagcctgtccagagcgaagtggcagagggcagtgacctgctgagggggtgccaggcaagcagtgaggacagttacagggtaccttctcccatcttttaaactcatatgctatcttttacggagattacatattttgatatggctctcgttgttgtcttttagcaaaacagaagcagaaagtggtaagttgtgtttcctttctaaactcctgctaaggttctgatccgtccatgcctgtggatgtcccgtttccgtgacccacatagctataatgtgagggatggacctcctccgtgggaacccttagtaggcacttactgagaattctggatgttgtggctgtcgaggagagaggctcagactggccttctcactcacgttgacttgtctttttcagacggagcacattcctccgtatgacgtcgtgccgtcaatgcgtcctgtggtgttagtggggccatcactgaaaggttatgaggtacaaattttatccattgctctcctttcctccctggggactatcctttggattctgacccctccaaggtctgatgacagataggaactggtggaaggcagctcagagtatgtggaggcagtggtagggaaaaccggtaaaaacaggattaaattctggagattaactgaacattgccatgtaatgaagaagagctcaggctgtggtgcacgacatttcaaagtttgccattctggctttgtgcttaaatggataaaaccaagtggaatgtaatatctaaatctgaagcttcgggctacccactcaccccttccagaaggatgatgtcttttagagaggaggaacttagtatacatttgttgaatgtcctaatgattttcttgaggcagatctaagattctatctctctttctccgagttggaaatgtcagatgatgagcaggaaagttatgaacaagaaaattaagtcccagacaaggagaatacccaacacacaggcaagtagggcagctgagcccggtgtcaactttgaggctatccactgctcatcactagaggcaaacctaactgtgccgtgcaaaaaacggctagcatccgtgcgcatggcaagcttatgccctccttgaggcagagctacctcctgaaggactaggaaggagagtttgcctggggtcctggtgaaaactctaggttcatttctcagcatcctggagaagaagtgcagggaggcactagcagctgtgtctgattatcatggccgtctgccctctgagacccactgtagctgcctggatatcatggggactctcctcggtcactgtgtcctttgcttccgccgctctcacttttgacttctctctctctctctgtgtgtgtctctctccctctctctgttgtgtttgcctcgttctttttttccccacctctgcaaaggtaacagacatgatgcagaaagccctctttgatttcctgaagcacaggtttgatgggaggtgagccatactgacgtttttgtcttttgatttttccttaactgaacaagtgtgataaagtgacttgtggatctgtttccaaccgttacagaagtcgagtagttaagctgaactcagtgttccagggggtacacactggaacagccacaaaaatatggcatatagcctgaggtccccaaggtcagaagggcctggaaaaggaaattaatccattttggggtataatgcatatttgtatttattttctcccttactattgagttcataacaatctggttttcatgaagaaattggttaaaatgtttgtttctgatgaatataatggctcactggtcatgttgtgtagtgtctgggaactatgcatatgtgtaaatgcatgtattcatgtgtgtgtgattcaaaggactaatatatattgctttgtaatatatatgtattaaggagggagcaatcatgactaggatataggcttcagagtcactattgaaggcaactacacttatttgcgcgctattttttagaaataacctttctatgcttttagttctgttttgtatatatcccacaacaagccattatcaatacagctgagctctcaaataattccctccttcagttctgtagaaagcgtctagagctcttaggtttcctagagaagtgagggagatctgtgttgacttaacaatgagagtgtgcttgtcctcaatgtgaaacgtggcctgtgcagaaacagccccctgaaaaaaaaactgagcatttgtcagaagtgaatttatatagcgcacattgagaaacctgaagaatgtgtccagtttatcactttaaaccaaagagttctttttacaaatctttaaatactttgaaatagattttagagtttaattaatgcagcattgaaagaaaaggtaaacataatcatgctttaagcataaattgtgtatctataaaacttaagtacaaacatatagaagtccatacaaatatgtatatgtatttataatttgtcaaagaaaagccttctatgtagtcatgtgaacatactcattggcttctaagactagctacaatataaggaagctgaggggctgggcgggccagtggtaagaatgcttgtgtgcaaacagagagcctgagttcagacacccggcactcacataagaaccatcatggctctcacgtgcctgcatcctcactgctgtgtgggaagagatgagagccacatgtgggcttgtggcgctgggctatgaaagactctgtttcaaatgaataaggtgggaaggagcagatcgggattcccagtgtcttctattgtgggcactcacatacaacacacataccacatatacacacacatgcacacatgtacacacaatacatacatacaacacacataccacatatacacacacatgcacacatgtacacacaatacatacatacaacatacatgccacatatacacttacacacatgcacacacatatacacatgcacaacacacatgcatacaacatatacacaggcaacacatacacattcacacatacaacacatacacacacaatgcacacacagcacatcagcacatacatatacacatacaacacacacagctgcaattttacttctagtaattgagagttgcattgaaaaaatgggaacgtttgcctcccattaggtggatttctaagtatatgattgagtttaggccagatcaccttactaatagacccccagatgtagaatggtttgaacatcctggaagcttaattttactcactaaatgatcagagataggggaagacgggtaagtggtgaggggaaactctgttaaaatgtttgcttcacctaccatttgtggcccttggtctttgacttgagttctccagcctgctaaagggaagggccctttagcgcctgtaaatagtgcacataaaagctcatttcattggctagaactttgttgtgctgtgttcttagctgcaaaggagaatgggaagtacaatttagctatagacctcagatgaagagaaaacagagcttgtctttgtcataatccggtgggcacaaagggttggttaaaacaggaaggcatgacccataagtgcctctatggatggcaggcagctaacatgagaggccgggtctgctcttcttggttgcatgtacacagtcctttcagctctgtggtggactcattggttttaacctggggtaccatcactgtcctgggcagtgccaccctcacctctaattctatcacagcctttgatgggaacaaagtccgtcctgtaactcagcctacacttgttaggttgctttggttccatatgacatccctacaaacgatgttgttaaaggttgaaaatagcactggtgagaacaggaaactacttcagaatatttggcaaatcaaaagctgagtggcttagtggctattagtgaagatggataccgtctttcatcccaaggccatggaagaggttgttcatttagttgcagcataggcttgtcttgagtcaggcagaatttacctgcctcagtcactgtatctacactattagagctcctttcagtttaaggagagaattaaaatttcaatgccaagttttcatggggtctggtgatacagagagtctggggatggtgagatctggaagcagctaaagcaataactggagacagaggcaggactggaagagtctgatgcataggcatggctagagagaaatgagtaataaagatgtggggtagggagagtgaacttgctttcaggtaacgagaagacagtactgaagaaaatccctgtgagcccactgcagtgtggctggacggttggataaggaagaagttggctgggagctcctcatagatgctagcacgtcttctgtgtggggaatgctgtgttttgagctgtgacaatctgctgtgttgtgtttttaccaattaataaaaggagggaaaacagcgcatagtcttgagctgaaatcagccaagagagccattccactgaagacgttgacacagtggaagtatatacacggtccagtgggagcctgttcaaggctcctttggctgtgactgtagcgtggtagacatcacggtcagagggtgccctgtagttttcaggaagagcatattagaggtccatgggtttggaggttttcctgttcaacactgcatttcagatcccaattcaaagtcaatacagtggtgcagacaaagcccatctgtttgactgaaacaagcaaaagcttggatgattttccttcccacgctttaggaatatgagtcactgtaggcctgggtcttactcggtctgagtctaactgcaatacatgtaaggaaaaatgaaaactgagggatcaagcagcccctgagaacctattggatatgtgagtgttcacatgcaagagtgaactgggagtgcacctggtggcactcagctttcgggggacacagtaggcacagagtgtctctatttcacaccacaaacactacccatggcttcatcttttccagtgaggtttttgcagttgctcagcccagcactgacagcatgaacaagcagctcccggctgcagtttgctgacttatactatgtgtttcaaatccccaacagttgtcatctaggcttaaattttttaatttaattaattaataattaataaaattaatatttatcaatttaattaattgaattgttaattgattttactagcacaaattcagtgtgcatagcactggatttcataaagacagccttgagctttttgacaataacgtagcatcatgttgtgtcctgaaatcatacatgaatcctatgaggcccacaaggtcctaaaaaaagggaactctgcccaaggaatatgcaaactaaaatgaatgaacagacagaacaagacaacccaaaatgttcaatcgaaagacaatttgaaagagaatttaagcatacaacgtagagaggtgctaaaacttagtacagagtttattaatggaaccgtcaattgatgacatcaggaagcagccacaccgtgtaagtcaaaactgtttgccattgcagttcacaactggaaaaagaaatgtctgtctcacaaccaaaaaccccttccactcagcttcaaccacaattttccctcctagtgcctgcttcaaacactagaaataactaaacacttgtgtgccaacttgaattacatcatgtctcactgcattccccaaagttttctctatatatgggtttcaccaactctgggacaggagagttcatggtggtggactgtaaactttggaagataagacatgaggaaactgttccccttgagtccttggatctccaactgtttcccttatatacaattacacacacacacacacacacacacatcattacagtcaaggcagcttctatttatatacttatttatttatttatttatttatttatttatttatttatttatttttgttgagacagggtctcatgtgtccttgaatagcctggaactcactatgtaaaccaggttggtgtggaactctcagggaaccacctgcctctgtctcccaagtgctgggattaaaagtgtatgccatcacagccactcttctaaggcaacttaaagaaggaaatgtatttggggcttacagctccagagggataggagcccatcacaatcatggagaggaagcactgtaacaggcagacttggtgactgaagccgggagctgagagctgagagctcacctctggatcataagcaagaaacagaaagagcaaactgggaatgccatgtggcttttgaaacctcaaagcttccagtgatggacttcctccaggaaggccatgccttctaagcctccccaagcagtgacactgactagggacctagtagtcaaatatctgagaatgtgggggacatcttaaaccaacatacatgctaagaacaatcatttaagaaactggttttctacagtgccttcttttcccacagcaataaccctctgagatactaattacaaatctgacacctttttattgattaggggttgaggctcaaacatgctgtaatttgtccttgagcatgaaaatcaaaagaaagatagaggggaccctggggtctcccttgccaccctgttcaaccagctttggaatatttttccatgtgagcactaggaattttaaaatatgtattattctaaatgaccttcttactaattagctggaatagagaagggtcttccagctgttacattagcaatgtgggaatactaattagatttgaatggatatgtcataactgaaagaaatatcttcctatagaaaatctgcagaggggcagatgaagtaggtttgcagataaaggcacctgccaccaagcctggaatccttctatagaggtctgcaccaggcagggtttagagaatggttttgctgggtttcagggccacaccctatcttcaggagaaccgaactcctgctgtcccataactgtggatactgtctcaatgagactgctaagggaagtgtttgaaggtttcaagatgcacagagtgctagaggaccaaggggagggtaaaggaagagggataggaagtataccactagtttaaagacattaaagactaaggaacacttgatggtgtcttagtcagggtttctattcctgtacaaacatcatgaccatgaagcaagttgggaatgaaaggctttattcagcttacacttccacactgttgttcatcaccaaaggaagtcaggactggaactcaagcaggtcaggaagcaggagctgatgcagaggacatagagggatggtccttactggcttgcttcccctggcttgctcagcctgctctgttatagaacccaagactaccagcccagagatggtcccacccacaaggggcctttccctcttgatcactaattgagaaaatgccttacagttggatctcatggaggcatttcctcaagagaggctcctttctctgtgataactccagcctgtgtcaagttgacacacaaaaccagccagtacaacggcaaatgtaaaaactttgctgaggtgatttttatttaaaaagaaagaaattgtggcctggtatctggctttgatattagtaagcctttcaacaggagaaatccttctttgtctttctttttttttttttttgagggggggggggttcgagacaggatttctctgtatagccctggctgtcctggaactcactttgtagaccaggctggcctcgaactcagaaatccgcctgcctctgcctcccgagtgctgggactaaaggtgtgcaccaccatgcccggcttccttctttgtcttactgacagacataggggtggagtctgccccttcgtagtctctacttcatgtgtgtgtgattttgctaacagacagtatatattattagtggagtcttttttactagaaaataaaatgagaaaaagagcattctgccacccacattgtttcctccatttttaactttcaaagccactgtttgcatatacattaaggtcaatagtacttggatagctttgtaaaagtgctttataacccagggaaagcatgagaatacacatttgctcatgatttcttcaaaatttaaaacccaggagttacgatttggcttatatagaactagaaaatttgggcaccacaaaaattattattctggaaaaattgaattctgccttaatccatccccacttatctacagccatatgtgtggttgttctggaatatgacaatatgcttctatccagatgccctactctttatcaaacaaaaaaactagagccccaaattaagcctgagtcccagactagaggacatcacatctcagaaccacatgagcaggcatggcagccagaacctgtagtcccagcattcaggcggctagggcagaggggtttcggcaagtgagaggttagactgggctacagaatgagactctgggaaggaaggaagggagggagggagggaagaagggagggaaggaaggagggagaaaaaaaggtgtaatagaaactcagatagatatggggctcacttggttcaaatctcacagcagggggagagttataaaccagctccggatggcttggtcatcttagagagctgttactggaaaacaaaactgaaccaaaagagaactggtgaccaagctccttcctacagtgaaggcctctagatcctcgttgcctggaatggagcagattctctctgttctcagtttccttcttaggagaaggtggaagttgctcaccagtgttttctgatgtcatgcagctcagttgaacttttcttttttgcctttctttttttttctttaacaaaacaatgaaatcatgagtgagctcgacatagaagagagaaattcagaagtataagctttgcccatgttgatgctcacagcggtcccaggaaatctcctcacaacttttattgctacacgggataatttgatgctgccttaaataattatcaaggcataaaggttcaagaagttagaacacggtggtattccaagcacctgcagcttatagatgcagccacccaggccagcaccacttggcttcagtatcccgctacaacttctgtacattctattgctgtaaaacttgaggcacagtggtggatacctatggcccctgtacaaaggaggctgaggcaggaggattaggaactcaaagttatccagatacatattgtgagactctgcctcaaaaaatgtttgttcgttcccgagcctttatgaaaaggacaatttttggtcctccctaaggcttctagtcaccagagcctccagacttagaatggccgaaaacaggaggaatgggaggacatgtaattaaattcatgcttccttctctgccctaaccctcaaagaagttcagccctggagaagaataagtctgctaagaggatcaagggaagcgatcctccctttatgaactcacccatgctgtgcagatgagagtagggaaggtctatggatttctctgattgtcctaggtggaccagctttgaattctacagacaatagttggaagctgagcggtctccgttaaaaattattttaaaacaataaaatctacaatccatcatttgataatgtgtggtccagctgttcccctctctccatacaaagtctctgctttagtcttccatggcagcaaggtgtgtgtgtgtcctaacttatcataactccagtgctcacattgacttcagcgactggggtcatgagtgccaaccagatgtgcacaagtgcacaccagatgtgctcagatcctatactgaggcttccatgcctgcagaaaggaaaccatattcctcacatcctacccacaaagctcctcttgggtctgtggagaaacacttcatatattagagattaactactgagccaagaaacacaacttagttaccaactggttgggtttgttttgttttttctgtgatcaaatgaagctttcccttttcagccaacggtgttagggcagagcagttgtgtatcctgaagggcttgttcaagagcaaatcaactgtgagttttgaggaaactgtatagctatttcctagaaagagcatgcctaattcgtgttttgattccctcctggtgtgctgtgtgctttaaaggcaacttggccaggcaggccataatggagggagcccattttcactggagtggttttcagctacagagccaaagcctgccgccattcattgtttctgttttaatacgagccagagtctgtttaaaatccttgtggctgacgtttactgtacagtggttctgtggtagtatgtgaagtatctgctaagcactgcagctatgagtcactcagaaagccacatgacatttttactggcttgtcctgttctgtgttcctcttcctaggatatcaataacaagagtgacagctgacatttctcttgctaagagatctgtcctcaacaatcctagcaagagagcaataattgaacgttccaacaccagatccagcttaggtaagatgttttcatatgggcattcggtgtatgggtggggaatatcttgtcctacttgggcactgacctacctggagaagtactgaatatctgtggagaaagccagccgttggacaggacaggggcagagtccttgcagcagccagaatccttttctccctccctccctccctccctctctgcnnnnnnnnnnnnnnnnnnnnnnnnnnnnnnnnnnnnnnnnnnnnnnnnnnnnnnnnnnnnnnnnnnnnnnnnnnnnnnnnnnnnnnnnnnnnnnnnnnnnnnnnnnnnnnnnnnnnnnnnnnnnnnnnnnnnnnnnnnnnnnnnnnnnnnnnnnnnnnnnnnnnnnnnnnnnnnnnnnnnnnnnnnnnnnnnnnnnnnnnnnnnnnnnnnnnnnnnnnnnnnnnnnnnnnnnnnnnnnnnnnnnnnnnnnnnnnnnnnnnnnnnnnnnnnnnnnnnnnnnnnnnnnnnnnnnnnnnnnnnnnnnnnnnnnnnnnnnnnnnnnnnnnnnnnnnnnnnnnnnnnnnnnnnnnnnnnnnnnnnnnnnnnnnnnnnnnnnccctccctccctccctccctcactcttcttcctccccctctcacttctagacgcttagtgtggtgggagccgacctcctcaggcccctctacccagttgctgttgcaccatggggaaccacctatctccttcccccaaacatcccaataagcttctgttgtaggcgacacatggctgacatggaaggaaagaagatgtttagagagggaaggtaatgatattcttgtgtggccaactggtagactcagaagagtcacacctttcagtagaaatggtggctaccatgatggccatgcagagaacttaaacttgtcttttctgggtacttgttggaaagcatctttacaaatcttcccatgagggagactataaagttctcaatgagttggtgtgtgcatagaagtgagccactttgggaaatgttcccctgagcccatggaaaaaataataacagttttgggagctgagagagggagatgaacatctgtaaatccagcacctgggagtggagtcaagaggaccaggagttcaaggccagcatagactacagaagaccttgtctcaaaagcaagcaagtagccaaacacaaggaacatcactagttccaaaaatgctgaaacactccagtctagtggtaaagagtgtttatgaagggcctccagcaccagagtctatgactgtcccagctttgtttaccagcaacaaatttacaaagaaggttcccttagcacccctctgagaacctgtctgattgttgcctttcttgaagaagatgagataggtaaataaaagggcctttgcctcccttatgcctgtaatttgcttattatactgtgtatacagattttccaagtactgggctcatcacccactatgtgatatggcctccttctctacccaagttccaccactgcttacagcacagggccattgcccaagggctttgagcattgcagcagtgactatgaacctacactccagttcattgctggtgcataggaaataaaaccctggtgtttctgagctatttggaccgagacttagagcgccttgtggattctgggtcctggggcagtgccatttgtattgctgccttttcgtttcttcagaaaaaatatcaaatgtgattttacattattttataatgatatgtgaggcttggaactaaaacaatgtcagcttgttctgctgtagttctgcctagaactgcttctttaaaactgtggcaaatcaattaaagcacaaatcgaggacctaccccaacatccttctgctgaaacggactgcaggaaaaattggccttattttccaaatggccttcttgagaaaaatttctttttaaattgcttctgatgtgctaggggaaaaactggatatatgttcattattactaacaaatgtagactattatctcatgagaacttggcagagattttcttaaatagctaccctgaaagctggttactggagcatcaggatggagcctttcaggtcattagtattgaataatgtgaaagtgatatgtatttcgtctacttaaattcatattttaaaagaagattgtctctttatttgtgtgtgtatgccacgtgaatgtgggtgggtgagaaggccagagagatcgatcctctggtcccctggagcaggattacaggtgatcgtaatatggatgctgaaaactgagtttagtcttctggaggaacagcgagtgccccctaactgctgagccatccctctagcccccataatcatactttttaaacatagatcgtgcattaaatgtcagtgattctttgagaaataagaagcttttgcttctatgcaaagtcttccccttagtagaatctaattcagatttgacgcatgagccactacatcgagtgactcataaactctatgaaggactacttgctgctgttctccatttttgagaccgtatcagtttttgaggctgcagtctaggctgaaactctctgcgtttcccaggataaccttgaagtcatgatccttctgcctcagtttcccaagttttgtgataccaggtattcactaccaagctcaacttttatatttcagaaaaacatatgctttgctcatatattttccttcaaacaaacaaacaaacaagaagaagaagaagaagaagaagaagaagaagaagaagaagaagaagaagaagaagaagaagaagaagaagaagaggggcttgtaaaccacagtagcattaatgtatcgcatcacagtacttgggaagtagggacagaaagaccacaattggtttgacctgcatggcaaggctctgtctcaaaacaaagtacttggattgcttcagacatttgaaaagaactagcatttttattcgactaagttagaagatgcagatttgggtcacctgatgattgcaaggagccagataggtttgaatcacgatacagtacaacatttgaatatagtcagctgtgtgtgtgtgtgtgtgtgtgtgttagttatacttatagtaactataccttaaacaactccactggctctaaagcttaaattcaactagacttggtaatcttccgattgtctgaggaagctcacaaccattagccaggatacaaaaatgtgcataacagcccctttccatccctcaaacgtgtttcctaaatgtggatcttgttaaaagcaacccccaaatggaatcactgtagctatataaataatgctatgctagggccgtgtgtataaagcacaccaagagacctggctcaagttcttctaccactgttttattctgagcacaattttatctttagaaaagattttttaaaaagaacagacactgtgtggcatacatctttaatctcagcactcaggagctagaggcaggcagacctctgtgagttagacaccagcctagttgacagagcatgttctaggccagccagacctacataataagactatgtctgaaaaagaaaaaaagatttttgttagatgggtctatgaaaatccaaaacagtttgttctactgtatagacagatacacacatctgaaagcttatactatttcttttttagcataagtaataattactgagactaaccactacctgccattttatttgtttcccctttcagcggaagtacaaagtgaaattgaaagaatttttgagttggcaagatctttgcaattggttgttcttgatgcagacaccatcaaccacccagcacagctgataaagacatccttagcacccatcatcgtccacgtgaaggtctcgtccccaaaggtaatcagcacatccctgtctacactctagaaacttccctcttgagggatgtctcggccctttgagttttgggggcagaagaatgtctccagagtctgttagtgagcacattttaaaatagtactcaagttctagggtagccgagaataatactacatctctttgagaagttcctgcctgctgtcagcttgataaaatacaaacagagcttacggaaggaaaattaaaagtagactcttcattttcataggctgcatattccctcttggccaatgtcctctttgataccaattcctaaatcacctgtattctctgcccagttgggagaggggatatataatccagagagaggtcttaagtaaggtgaaagatcgccatgtaaccatctcctacaccaatcctacaggccttctcatctgtgtgtagctgggctccttaaggaacatagttctgccttggttaagcacaactggccatgatgctaccaaatgactggaatagaggaagaaggccccgattccacttttgattttgatgtccttttatttcttacatttacttagttggtatttttgtttgtttgtttttaaagtctgtgtgtgaacttgtgctgtcacagcttatgtgtggaggccagaggacaactcaaggaagtcaattccctcctttcaccatgtgggctctgaggatggaactcgggtcatcaggcttggtagcattcaccgtcacccactgagccttctcactgtccccgcttttgctttggaacagtgatggtgttctaaaaataaatatgaaatagaaacccatgagaggcgttgccttaatacttagctcctttccaaggcctccttgaatgagtttggtttgcctaaatgcaaattcaaccccctatccaaacagcggtctccttttgtggtcaaagaaaagcctagagaagctgagacttgtcaccctccccaagttctcagcctcctggagggcacagctcttctacaataagagtgggactcccaaactatgatcaggtaattctggagagtgggtagaacagaccagcattcccttgaccactggaagtatccttgcccctagtccaagcatcctctgcagtgaggctgtcacccacacccccacagacaccgctggtatctggaagtccaggatcaggcacttgcatggactcatgcactaaggtatcacagaacttcatgaaggagcatgttgaagcggggaaagccctgctaaagcataagcaaaaactgaaagggagagtgtatggccaaatgcagctacagctatgtccaaagctgtagatatgtctgtctcttatccagcaatgtttcaacacaaatgttttacctaggttttcaatcctgaaatagtttgattaatttaaatttaaatcaactatttcattaatttattaaaaatataacatgcatgaccctgatacctggcatgaagataatgaactcaagtattactggaccaaataatatcaaaatattgactcaacataaggaggaacagaccagctctttctctttgacaggaagctttgaaatctacaagagacataaaagtctaggtgggaagcgaggctgtcatcaggagcccacagggagctagggcaggatagctatgttcagtccactctaggcccgtagcatagagattctacgtaggtgatttctcacactggagatcctttttactaatcctcagggttacataaactggaaaaaaaaaatctgagcccagtgtttgtggtttcctttcacctcgttgacaatctcttgggttcctgtcatcttgtcaggttttacagcggctgattaagtccagaggaaagtcccaaagcaaacacttgaatgttcaactggtggcggccgataaactggcccagtgcccgcctgtaagtaaaatctctttttctcttaatcattgatgaccgtagggaggtttttctttcaatattacatcatggcttttattctacagaggtggtggtggtggtggtggtggtggtggaggtagagatggaggtggtggtggtggtggtggtggtgagtggtttcttggagtgagctgctgatgttacattgggtggactcagacttccagaacaggatagtgtttgccttgtcctgagagctgaactccaagtctgaaacccactctctttccttcttccctgattaccttgcacccaggcaccacatccagtcacacatgttgcacttgtaagaaaagagccagctcacctttcctttagcttccctgctagaagatactggtgggcacaaaagagtgtaaggctgaaggttaaagctggattccaactagaggtctctgtgttgctaacagataaagggataagtgttgaggggttgaaagcctacatgctgcctagtgtcattgctagaaagcatctgcaggattagaaggcacacattgctgggctgggctgggctgggctgggctgggctgggctgggctggcaacggtaactgttttcataggcattcagagcatggtagattagccatatctgtgcctgctcaattaactgatggtttctgtgcctaggtttctctaaaagaaataaccattgtcttggttgagtcactagattttttaaaatatttatataagggtcatgtatgttctgtgaaagtatagaatccaattcatgtacttggagagatgacacagcaaggctgttcaaagcacagacaagttatataaacctaagcaagatacctactgcacaggattggggtaaaaattcaagaggcacctgcatgcatatgagagaaagttcttagaacagtgcctggcacacgatatatgctgtccaggagccactgatgccatttcccaggtatgctccatgctgtgccatgcatgatctgttagactctgtgaggatgttcctctcaggttcaaggttggaccacacttccccatcatagtgggcccataataaatgtgtggtgaaggagtgaagaacgaatgaaagggtgtacagagaagaaaagcaagaacaacaatacatcctttcattagatgtttaacacgggccggacagctcgctggatgctttccactctttgtcatcctcactctgaacaaagtcccacttatcatcaaagtaacttaagccagagttgattgatgagtctgttgagatcacaaagcagattaagcttagaagtgggtctggcttccaaccagtttcttctccaccaccacctaccttcctcacacaatacagttatcaggttacccaccctgcagatagatccagggatctatgtttagtgccacgtagtctactaaagatgtcacttacagagtggaatgtttggttaaaatgctgagaaactatacaagaatgtgtcacctaagccctggccctgccatgtttcacagctgtagaaacataatctttactgaagattatttcttcagtattattttagcaaaataatctttataggtactaaaagccaggaactgtgctattcattctgctatttaggacaatcttagaatcgtagttataatcagtttgacattctaggaagcagtcactaaaaaacggaaatggagttacaagagatttattggagaaaatatcttttcttcttatgtcagtttattaaccctcagctaaagggactatagagaaagtaatgtatgacttgctacaatcgaggtttttggggtgctgagggcattactgaagtttttagagtgaaatccttgccttcagtcaccctaacaagcaaggtcccaccacctatcttcactgtgccaactaagcagcaggaaatcaatatgaccactctggggagaagaacaaagggatctagcagttccccatgaagtcctccttcaggatgctggcatgaagttttggcttaaaaaagggacaaaaatttctggttctggtgtggtccagctcatcattaacacatcacatctccctctgccctacaagctgtcatctgtgggaaacctcttcttcctcggacaccaaccatggcttcagccttcctatgcaccaccaaagggttcctgagtaaattctaatcccttggagttcgttgcttcagtagtctgatagcccaagagaagttcacaagtagaatgtcttccctcatgccaggatagttacaagcatcctttaccatggtgcatctgcacaatgtgctgcctctgagatagatgggaccaaaattagacacactcacatacatacatgtaagccacatggtgggtttgtctccaggtctgcaatctcaacttgtcagggtattggaaggacttccctcctctaccactctgttagcaagacagacacattcttgttcagaataattggtcagaaagcttagcattttcaacaaacagtcagagcacttaaggtaaccacatacctaacattttctaatgtttgatattgtgtgcatagcattcctccttctgggaaagaatcatgcgttctattttggcccacatgaagaaatgttcagatcacaagagctagaagcaatttaaaaatgtgtctgcatttatcccttcacttcaagacatcgttatcactgtctcccagagcctggcgatcactgggacatttcagttcctttgaaagggtctgcagcttgcttacttggcgtctatgtccccagtctgctgagtcagcagactccaggagcagggtctcacactgcagtgatatcacaggctctgaaaagggacctcgcaaaaagccactaatggaaaaaattaactttctgtagctagaaggatgagtctgggaccagggactatcaggtacagactattggatggtctcagaagatatagggaaaggaacacttttatttttttcttaaaaagatgtttaaggaaatgctaatgaaaacactggccatcaggtttctctgtttagaagtccagttttgctaacgtgctctctgtatctccagcaggatagagggtatcttgtgcatctcagtaatgtgtttgcaggtctttttccacagaaaagcctgtgggtttaatgtttcatggaacacttaacgggaaatacagttctgttccaatcttctcattttacaagtgagggaactgagaacaagaagcagtgaactggccttccaaaggctagatgtcttgggaaatgatagtgtcttaattcaggaagactcgagatcagtggttctcagcctgtgggtcatgattccattgggagttgcatatcaaatatcctgcatatcagatatttacattataattgataacagtagcaaaattactattacaaatagcaacaatataattttatggttggggtcactataatatgaggaactatattaaaaggtaacagcagtaggaaggttgagaaccaatactctagatggcaaatagcagtaggttaattactacatatattagagtttctgttgctatgataaacactatgactacaaggaacctggaaaggaaagggtttattaaagcttgtagtccatgacttatggaagtccgcgcaggaactcaggtcaaaaacctgggagaatgaactaaagcagaagcactctgaagaactctactcaatggattgttcctgaggtcttctcagcctgcttctaagatcacccaagaccactaacccaggggtagcactgcccacagagatgggcccttcctcatccatcatcaatctagaaaactttgggaggcattttctcaattgagattccctctctccccaaatgactctagttgtgtcaagttgacatatgctaggcagcacactgcatattctccacaggaaagaacactgggcttcattggcaagtattttgctaagagaagagtcaataaactttttaataaagggccagagagtaaataattaaggtttgttgagctgggtggtattatttccaaaactcttcaactttgcctttgagtagcaatgaacatgcatataaaacatgggaatgattgaactccattcaaactttgtagaagccagaggcaggaccggagcagctgaaagaaattgccactcttcttctaggacaaactttgtcatctattactgcaaaataaatagtcttaaaagtagagatttcaaacaggctggtgggtagcaatcagctgatagctgactgatctctcagcgggggttaagtagaagaaactcaacctgttgttcctttccacttggttcagggtctttgtcatgagcccttttctgcggggctatggccttctatgtgatcaaataccatagtctcctcagggtccatcttaggttccatcccagcatctcctcagcatttagctgatccaagtgatcacagaggcctcccagatccaaggagagagggcatattgttccatctcagtacagagaggaccaaggaatttgtcgtcatttgaaagtctgctctaggaagaaaaaagttaacacccagtaaagaggcaaacaggaaagtgtccccaggccctgagatgcgggaccccttgcagactctttgttgtgtggataaccaggttatgtgttatgagataacacatatgattgacataagcttagcaaaaccaccaagttcttttcccatggacaacactgccagatattgttcgtctttgagcaataagaatggacagcatagagagacatggaggggaaacgttgagattctcgtctttgtgtgagcgctaccaattagtggcgagaactaatttttttctttagtgccttaagaaaggaggttctgccagagtctgccactattatttggcttcactttatctccacaagatggcctaggtccttaaacaacaacagatatctaaatgtggactctggtttccagttagtgagctgagtactccagagctcagagacttcgataatgcaaatcataccattttgttgtgaaggtaacatttactagctgcttgttatgtaattagtattagagttgagccatccacccatgctaatttatagaaacatatgtattctttcactgtatttatagattttaattgccttcttcagggtatgagcatcttttccttttcggaggaaaggccaagctccacttgtcccagtagcgtggtaacaagagaagcataatgcttggtgagaaaagcagatagacaatgggatgacaaatgaaatataatcctttaatcccacttagtaacaggctggcttgtattaccaaatgctgacccggtggctctttgagctgctaatggctttttgtctgtataaaatgacatcaaccacttcttctataagaggtgagttcgtcttctcagcagaggcttgcttgtaaacctctaacattctgagaaccagaatgggtctcttctcatctacttcatttcccattgctaaatgggctccaagtcatcctaccgtgcaggcaagtgccgaggggaattttccaccgcccggttccagcaatatttaaattcttgagaatcatacagattcactcgtctgcctgacagattctctccgatgctgcgttcattcgtatgaaaccctggatgctcgatgtttaatttttcatactgcttcttaaaaacaggataatctgttccacatcttctcttcacagaaaaaggcccccacaggatagaatttcattctacacatttctagaaatttcaagcaaccaacctgggtgtagtatggtggaaatggtccctttcctccagggctatgatataacacatagaattggcatgaacttaacaaaaccattgagggcccaatattgttacagtctttgaggaatcagaatgggcagcatagagagaagggggggggaacatattgagattcaaaatcagtgttcctatattctcacttttgtgtcagcaccacaactgtggcaagaactgatttttttttttctttagtaccttaaaaaaggagcttctgccagagtctgccactattatttggcttcactttttaatctccacaagacggcctaggtccttagacagaaacagatatctaaatgtggactctggaataatgcaaatcacacaatgttgatgtgaaggtaacatttactggatgcctgttatgtaactgatattagagttgagccatccagccatgctaatttactgaatagcatatgctgatcgttcttcttaaatggtgacaccttagaggcctctctatattacaatagtaaagaaatagaggtgtaagaatctaatattgcctacttcctttaagaaataggagagatgacagcttattggttaagagcactgactgctcttctagtggactttgggactcccagcacttacatggcaccttataaccttgtgtaactccagttccagggaatccaataccctcttctgacctccttgggcaccagatattcatgtggtgcacagacatatatgcaggcaaaaccactcatacacatgaagtaaaaaacaaacaaagttaatctaaaattaaagggaggtaaagctagcagcataattggtttctaaggtttgtaagctttgtgttaaaaatattaagttacgacttcctactgtaacacggtggacaggatacctgagtagtttgtattttgtagtcattaaggaaaactaaccagtcattctctgtatgttctccctcccaaaagaatacaaacaaatgacatttactcccttcctgaatactactgattgctttgtaaaaactggagggaccatttcagtttgctccttgtctgggttttagcacagacagctcctgcagaggcacacaataatccacagtgaaactgcttaacaagggaggtggggaggtacttgggactttttgaaacatcgaaacccttcacactttcttatctctttcgagccttgttcttctcccagctctgagtatatgccaggcctgtttctacaacctagaactcacagtgcttttgtactctgtgaacaccaggtctcctgcctgttcctgctccattgctgtttgtttggggtccaacatgcctcaactgcagaaagggctccatcctaggatgccagaggtgttcggcatgccagctctctggaccatgccctgctcctttttcatcatgggcgtcacctcaggcctcataggggaggggcaaactgctctctgccagggacttttgccatttaaatggttctctttgtctctttccacgcttaggacctcctgcattgcctgggaagtggctgatgagacttgacttttaagttcattctaaaatgcggcaaggctggtttgcagaaccggtttggttgcttcactttgcatttctctttgagtttgtatatatattttacaaatccccgccctggtgtcattcgagtgcactgttctgttcagctgtgttattttctaaacagaagaattgtcaagacacatagtctgtgaaattcttcccattcggaaataagtacatactccaggatcattcagaaggtgaaatgtgctatctttatgcttttgaaagcctgggaacagtttccaaccatcctctaccatatagctaccatttagcagttaaaaaaacaaaaaaaaaacaaaaaaatccaaacaaacaaaagaaccccagcagtttgccagaactgatcaggcttaagcaaacagccctgtgctgatgtgtacaaattctacccactggcaaagggaagcactttattaaaattccgtgcatttaactgtgctgattgtggtttccatagtgatgatgaaatgggggccagccaagtccatatacaccccactccgcactttgcagtctgtttttttctctttacatgaaaaatgttcatttaaattatcaaatattaattgtatagattagtgggttcactgctattcatcaatacactatgcattgtgtacatccacccactcctctgcaacctgggacccccacattctcccaccgcccttccctgttcctaaaacttcctgtttgtctctatcccccaactcctgtctcttctcctgccttctgttgcattcagcccttctacaggatgacttgctgctctccgtacctgaatgagaaggagtgtttagctgcatctgcagcttttcactcaatacaccttctctagtccatcccttcttccgtgtcttgaatagtactctattatgtaattgtactgcatttcctttacccatacatttattatagagcacctgggttggttccatattttggctattatgaatagtactgcaatgatcttgggggtgcaagtccattttagttataaatactccatctcagatcatggggtacttctacttttaattttgtgaggagtctccatttcttttccataaggtctacacgtctgtccaatctcaccaagagtgtataagagttcccaccatttcttctattttgataataaccgttctaactggagtgagaggctatcttaactgtggttgtttttgttatgctgtttgttaagaatcaaaccaagcctaggaaatgctaggcaagtactttagggcagagctgtgactccagacttgttttgtttctttatagacaaggtctcattctgtaacctaagctggcctaggatttgcctggctgacctcaaatgtgtgattcttctgcctcagcttcatgtgtgctgggactacagccttgagccaacacagtgtgcctgttgtggtttgatttgcatttctcttataattagtgaaagggaacggttttgtgcttcttggacatttgcatgtttcattttaagaagtatctgtgatgttcatccgtttgggttccttctgtgttctggatgccagtgtgcagttttccatttgcagacatttttcttccaaccttgtctcttaatcttgttttgctgtgtcagcatttcttagtttgctgtgaactcatttgtctatttttgacttttgtcgcatgtgtgtttagattactatcatcaccccccaccgacacacacacacatcttagagtagttcccctgttttcatatattaagttcatggtttcaggcttaattcaggcttataataataagggtttgttatatccctgttcctgtttgaattgggtttcttatgtggtgagagaaaaggacccacttttattcttctgcatgagcatatccaattgtcccaaatatttattgaagagactgacttttttccactattagattctttttttttcggaagatttattttttaattatatgtaagtacactaaagctgtcttcagacacatcagaagagggtgtcaaatctcattacggatggttgtgagccatcatgtggttgttgggatttgaactcaggaactccagaagagctgtcaatgctcttaaccgctgagccacctctccagccccactattagattcttacctttgtcaaaaaactatttgtgttgggatgtagctcaaggccagagcacttacctaatatgtgggtagccctgagttctaggcatagcaacacacacacacacacacacacacacacacacacacacacacgggggggggggggagagagagagagagagagagagagagagagagagagagagagagaatacatacactactgttgggatctttccagacaaagaagggtctttaatgtccttttaggaataaacaagcccatgctaatgctacaaacctgtgcagtcaaaatgcgtacagcaaatatgagcaatgatcggatgaccagtgtcctactcatggtctctaagtcacagaatgtgtggaacaatggagctgggtagaactgagaggggcccttcagtgagcactgcccactgcccttccaggcctgttttacagtctgtggtgctttggggctatagttgatcttattttgctcaactcatcactgaagcagcacggtcttcagtgtctgtcagagcattgagggcgggtctcaggtctcatgatggctgatgtctctgctacccaggggaggaggtttttggtggcaagacagagactcgtctttgttttacttggtgggaagcaaggtgagggtgtctggcaaccaaaactctaggtacgaagtgttctgtgtctcatggaccacaaacatcttctttacttgtctcattttctcgactctccatatagaagtatttgacttactaattatttctccctcctcagaagttaaaccagtctctctagacctctttctaactacagaaccttaagccacagcaccaaacattaacagtctctgtatagttctgaattagtcttggcgtgacaggtattataaaagatttggatactttaaagctggtctcatccaccatatgatatgtatgactctcaagcccagggtgaggttggacttctttgccactgaatacccacagagcctggaacaaagcaaatgttgagtaaatgttgtatggatgagtgaaatctgcatagaaaatgcactgggaattctatagagtgtaaggtctgggccaaggtcatctgatacagccataaggaatgaaacctgatgcaggctggaagaactatagtatctatagtaagagtgaggctgctacaattttactgagagcagtcaaacttcttatcccttcatcatgaacaaattataatggcagttgccaggattgataaaattgtagttcccaggatacaatgattaccaggtataccagattaacatctaagaccaattgtcctggcatgcttccacgcttccttgagtcctaaggttacatacagagaaacacaaaatggctggatcgcttcactgcctgagggagtgcatccacctctcaggaactggaagacacgtggagcctcaggagccatggactctaacctgaaacacctatgacacatgcctgtcaaggcagctaggtcaggtcaactccatggttgcctgcaattggtaaaggttcttgggggtgggggtggggagggcatttttctctgtaagttgacctggttggagtcttctcaaatgagtcagtgggaactgaagtcactagccctcactgtcccattgtaaggaccttcaaattccttcccctgttaggcacaacttttttcaataaaggtggatacagtgagtatctaatcataggctggaagaacagctcagtggccaagtatgtgtttagctttcctgagttcatggggtcaaccctcggcaccaaaccaaaaataagcagtgaacactggcgatgagacagtttacaccaccgtggtgacagcctcaggaatcctttgttctaagcactggggagaacgagccagctgggacactgccaatcccacgtcttcctgttgccactaatctttacccaacaaggtcaatgctggtggcagtaactatgcactcggctaagtaccgcggttcttacctaggtaaaatgagctcacaaaaacagtggggatgtgnnnnnnnnnnnnnnnnnnnnacttgtatggggtgtgttagcgcttccctctagaatggctttctcttgccgagggaccaagaattctgcctttccctacaaagagtctacgtgttgggtacagcctcttctcattcctagttgcccggccacaacacaagaaccattctactatattgaggcacaaaatctgcttctcgtttataggtaaataatgaacaaagtccttactactgacataaacatggacaccgactgcttcttgtgtggcttcttccccagttaaactctcttgtgctttaccttttgacaaaaccgtcccatggtagcagccatcactgctgtgtgctctctaatgtcagtcccagactcgctttcctttttgtttttatcatggggcagagaaaaccattttcatgagcattctgaagggaactatgtacttcttattaccttcagcacagttaccagaacaatacttattccaagggcatgatcgaggtgtcaatcattttcagaactctatttctggcatcatcactaacttgtttcttttgtacttttgaaattggtggaattcagctgtataggaataaatggacaaaatgtgaatatgtgtgttttcatgttcatgttcgcacacataccccctcaggttttgttgctgttgttgtttttcaagacagggtttctctgtgtagccctgggtgtcctggaactcactttgtagaccaaactgaccttgatctacctgcctctgcttcccaagtgctgggatcaaaggcatgagatatgaccccctggcctcatctttttctctttaaatcaggaaagatcagaatatttaatcgtttctactacatatgaggaatgctacttctgccttaagtggagttgtcagtaaaacctacagtagaaatatgatggattttcttataatctgcaggaaatgtttgatgttatattagatgagaatcaacttgaggatgcctgtgaacatctgggagagtacctggaggcatactggcgtgccacccacacgagcagtagcacccctatgaccccattactggggcggaacgtgggctccacagccctctcaccatatcccacagcaatctctggattacaggtactacttatttccaggatccagtagagaattcattaagatgacggctccagttgtgaagaagctgaagaccacggcttagttcccagcagccacacggtggctcacaaccatgtgtaactccagtccaaggagatctgacctccatgggtgccaggcacacatgtggtacacagacacacatgcaggcaaaatgtttatacttataaaataaatagaacttagattttgttttaattaaaggagaaaacgaaaccttacactggtcttgagctgtcactgagaaagcctgccccccccccccaagtttctctttctgaagaattctgctatgaagggataatgagtttcacttagatttctgagggccctgagatctctcctagacttaatagtcagctattcacagtaatagtaatcaacttgctctcaattgcacggcaccacggacagcacttcagcgcagataggcctccaggctgcctttaactgttcttgttctgaaggctgctgaacctcccctcccccttgtacagacagaatgcgtgagcagatttggaaatgatgacaggtcccgagtttccaggggtctttaggggcctcccctggtcagtgtaggggatttggagataagcacggagaacgtcagagcttgtcttttctgctgctccgcgctgttgccagcagaactagaagttggatgccagaggcacggtgatataaactgagtcctgcttttctgcggtaataattattcactatttatcaagcagctggagtggatccaaactccaagctgaggaacctacagtcaaatgagcctcttggcaacgtgactggctttgttttaatgggttataatgatagtcataattgaagattttgtagagttaaccctaagctaaacggcactctctgaaatgttattataactacattactccactgcagacggcatgcacctttctaagcagagaacttgccaaataaatgaatttcttctgacactagaaatgaatataggaaacggacaatggtaatgctcggtgtgtctgtatgcaccagcactatctctcgccttgttttccttccggtatgcccggctaagagcaacattcccattggctatggatgcctctgggtggaaataaaggggagaggtgaatgacccagtaagctttgtagtgctggaatatttaatggtgcattttgtttataacacataaccctacaactaggcacgtacagtagcttcccctgatgagttcatttggtgccctttatcctgtggcctacttctcccggtaaccaaaggtgtttgatggcatgacttgtgatccactaagtgagtttccttgtgtgggaagttgatgtactttggagaagagggacctgggcccttggttgcatcacgtccctgctgtataatctgtgtgacctatctaagctgggaacacaaacagacaggtgctcctaagcaaggaaaagaagtcagataatgtattctgggccatcaagcaaccgctttaagatgttcgtttcaataaataatattaaagaacttggcttatatttgaagattgtttctgtgtcagatacagaaacaaatgcattatttaatacatagtatagatagtaatttcattcactttttttcaaagctataaggaatattgatctaggacaagatgaagtaaatagtgagtgacttttggaggaaaatatttttatgaattcatgagaagaatcaaataatagatcttattctaaattttgtttcctaatgataaaataattctcatttttcccaatggggagaattattaagcatgtctaaacagactaagttctatttaagagtccactttcagttcttgtgtttccacaggaagcacagtcattcaatatcagaaacttacattcataatctaacagtaataaagcatctatgtatgttgcaccccaaagaaaaaggccaggtattctaagcagaacgtttgtgaatcaaaatgctttattaggtcagacagcagctcgttgtatagaccctgttactgcacacacacacacacgcgttagcatgtttagctaaatgaagctgaccttatctaaccagtgaactgtctgatattcttagagtcagcgaatgagacacagcaaccattctacagagaattctccaattgaaagacgaagcctaatgacctcggatgaaaattaccacaatgagagggcccgcaagagtaggaaccgcttgtcttccagctcccagcacagccgagaccactaccctctggtggaagaagattacccggactcgtaccaggacacttataagccccataggaaccgaggatcgcccggggggtgcagccatgactcccgacataggctttgaggctgccgaaacaaacaaacaaacaaacaaacaaacatcatctgttgacaatttgccatagtactgctattaaccagtcatcttaatttggcaagcacagcacagtatctgctgtgtgggtgggctgctgtcatttgatcctaggggcaagaattaaatagaagtacattatgcccttgagtctagatgggtattagatgcccgatcatataggtatttttaagtgctacatttacatgataacagtaccttttgttttcttcatagattttagacacatcaatttgtaatttagggtacttatcaaggcacatataaaataatttcccgtgtaggaaattccaaatgaccagttccagttggaaccaatttataaaccaattcctgttggaatttgggtgaattgactggaaagtctactagagcatgttgaaatcaattgaaaaatcagaaaaagaaaatatccaataaagaaatcaaaatattaattgaaaccaaacccagctgtggaatttatttgctggaagctaaatttacacttcaagttggaatgtataaacattttaataatatgttaatgctgccagaatggcttttcaaacttaccaaatatattgatagtgcc

SEQ ID NO: 22 - DNA, 2126 bp, Mus Musculus
ggtggcccgaggcaccacgacccggaggagcaggttgaaaagatcggatggcagcaccacttctaccagcttcatcctcagacaggggtcagcagattcctatacaagcaggccatcggactccgatgtctccttggaagaggaccgggaagcgatccggcaagagcgagaacagcaagcagctatccagcttgagagagcgaagtccaaacctgtagcttttgcggtgaaaacgaacgtgagctactgtggtgccctggacgaagatgtgcccgttcccagcacagccatctcctttgacgccaaggactttcttcacattaaagagaaatataacaatgattggtggataggaagactggtaaaagagggctgtgagattggcttcatcccaagtccactgcgcttggagaatattcggattcaacaggaacagaaaagaggccgttttcatggcgggaaatcgagtggaaactcttcctccagtctgggagaaatggtatcaggaacattccgagcaactcccacaacaacagcaaaacagaagcagaaagtgacggagcacattcctccgtatgacgtcgtgccgtcaatgcgtcctgtggtgttagtggggccatcactgaaaggttatgaggtaacagacatgatgcagaaagccctctttgatttcctgaagcacaggtttgatgggaggatatcaataacaagagtgacagctgacatttctcttgctaagagatctgtcctcaacaatcctagcaagagagcaataattgaacgttccaacaccagatccagcttagcggaagtacaaagtgaaattgaaagaatttttgagttggcaagatctttgcaattggttgttcttgatgcagacaccatcaaccacccagcacagctgataaagacatccttagcacccatcatcgtccacgtgaaggtctcgtccccaaaggttttacagcggctgattaagtccagaggaaagtcccaaagcaaacacttgaatgttcaactggtggcggccgataaactggcccagtgcccgcctgaaatgtttgatgttatattagatgagaatcaacttgaggatgcctgtgaacatctgggagagtacctggaggcatactggcgtgccacccacacgagcagtagcacccctatgaccccattactggggcggaacgtgggctccacagccctctcaccatatcccacagcaatctctggattacagagtcagcgaatgagacacagcaaccattctacagagaattctccaattgaaagacgaagcctaatgacctcggatgaaaattaccacaatgagagggcccgcaagagtaggaaccgcttgtcttccagctcccagcacagccgagaccactaccctctggtggaagaagattacccggactcgtaccaggacacttataagccccataggaaccgaggatcgcccggggggtgcagccatgactcccgacataggctttgaggctgccgaaacaaacaaacaaacaaacaaacaaacatcatctgttgacaatttgccatagtactgctattaaccagtcatcttaatttggcaagcacagcacagtatctgctgtgtgggtgggctgctgtcatttgatcctaggggcaagaattaaatagaagtacattatgcccttgagtctagatgggtattagatgcccgatcatataggtatttttaagtgctacatttacatgataacagtaccttttgttttcttcatagattttagacacatcaatttgtaatttagggtacttatcaaggcacatataaaataatttcccgtgtaggaaattccaaatgaccagttccagttggaaccaatttataaaccaattcctgttggaatttgggtgaattgactggaaagtctactagagcatgttgaaatcaattgaaaaatcagaaaaagaaaatatccaataaagaaatcaaaatattaattgaaaccaaacccagctgtggaatttatttgctggaagctaaatttacacttcaagttggaatgtataaacattttaataatatgttaatgctgccagaatggcttttcaaacttaccaaatatattgatagtgcc

SEQ ID NO: 23 - protein, 499 aa, Mus Musculus
VARGTTTRRSRLKRSDGSTTSTSFILRQGSADSYTSRPSDSDVSLEEDREAIRQEREQQAAIQLERAKSKPVAFAVKTNVSYCGALDEDVPVPSTAISFDAKDFLHIKEKYNNDWWIGRLVKEGCEIGFIPSPLRLENIRIQQEQKRGRFHGGKSSGNSSSSLGEMVSGTFRATPTTTAKQKQKVTEHIPPYDVVPSMRPVVLVGPSLKGYEVTDMMQKALFDFLKHRFDGRISITRVTADISLAKRSVLNNPSKRAIIERSNTRSSLAEVQSEIERIFELARSLQLVVLDADTINHPAQLIKTSLAPIIVHVKVSSPKVLQRLIKSRGKSQSKHLNVQLVAADKLAQCPPEMFDVILDENQLEDACEHLGEYLEAYWRATHTSSSTPMTPLLGRNVGSTALSPYPTAISGLQSQRMRHSNHSTENSPIERRSLMTSDENYHNERARKSRNRLSSSSQHSRDHYPLVEEDYPDSYQDTYKPHRNRGSPGGCSHDSRHRL

SEQ ID NO: 24 - DNA, 2333 bp, Mus Musculus
gctttttatgctctgtattggagaggcagataaaatgccaggtctgcatgtctctggggataacctcgccctgtatgatgtgaacgaataacatcttgcctggtaaatccacaggaattgataaggcagcgcagctcttccaaagaggccttttattattattattttttcttttaagctctagctgtggtttctgcagcaattttgtttttgccttaaaagaggtgctgtggattattacacctccatgtatgacaatttgtacctgcatggagttgaagactcggaggctgggtcagcagattcctatacaagcaggccatcggactccgatgtctccttggaagaggaccgggaagcgatccggcaagagcgagaacagcaagcagctatccagcttgagagagcgaagtccaaacctgtagcttttgcggtgaaaacgaacgtgagctactgtggtgccctggacgaagatgtgcccgttcccagcacagccatctcctttgacgccaaggactttcttcacattaaagagaaatataacaatgattggtggataggaagactggtaaaagagggctgtgagattggcttcatcccaagtccactgcgcttggagaatattcggattcaacaggaacagaaaagaggccgttttcatggcgggaaatcgagtggaaactcttcctccagtctgggagaaatggtatcaggaacattccgagcaactcccacaacaacagcaaaacagaagcagaaagtgacggagcacattcctccgtatgacgtcgtgccgtcaatgcgtcctgtggtgttagtggggccatcactgaaaggttatgaggtaacagacatgatgcagaaagccctctttgatttcctgaagcacaggtttgatgggaggatatcaataacaagagtgacagctgacatttctcttgctaagagatctgtcctcaacaatcctagcaagagagcaataattgaacgttccaacaccagatccagcttagcggaagtacaaagtgaaattgaaagaatttttgagttggcaagatctttgcaattggttgttcttgatgcagacaccatcaaccacccagcacagctgataaagacatccttagcacccatcatcgtccacgtgaaggtctcgtccccaaaggttttacagcggctgattaagtccagaggaaagtcccaaagcaaacacttgaatgttcaactggtggcggccgataaactggcccagtgcccgcctgaaatgtttgatgttatattagatgagaatcaacttgaggatgcctgtgaacatctgggagagtacctggaggcatactggcgtgccacccacacgagcagtagcacccctatgaccccattactggggcggaacgtgggctccacagccctctcaccatatcccacagcaatctctggattacagagtcagcgaatgagacacagcaaccattctacagagaattctccaattgaaagacgaagcctaatgacctcggatgaaaattaccacaatgagagggcccgcaagagtaggaaccgcttgtcttccagctcccagcacagccgagaccactaccctctggtggaagaagattacccggactcgtaccaggacacttataagccccataggaaccgaggatcgcccggggggtgcagccatgactcccgacataggctttgaggctgccgaaacaaacaaacaaacaaacaaacaaacatcatctgttgacaatttgccatagtactgctattaaccagtcatcttaatttggcaagcacagcacagtatctgctgtgtgggtgggctgctgtcatttgatcctaggggcaagaattaaatagaagtacattatgcccttgagtctagatgggtattagatgcccgatcatataggtatttttaagtgctacatttacatgataacagtaccttttgttttcttcatagattttagacacatcaatttgtaatttagggtacttatcaaggcacatataaaataatttcccgtgtaggaaattccaaatgaccagttccagttggaaccaatttataaaccaattcctgttggaatttgggtgaattgactggaaagtctactagagcatgttgaaatcaattgaaaaatcagaaaaagaaaatatccaataaagaaatcaaaatattaattgaaaccaaacccagctgtggaatttatttgctggaagctaaatttacacttcaagttggaatgtataaacattttaataatatgttaatgctgccagaatggcttttcaaacttaccaaatatattgatagtgcc

SEQ ID NO: 25 - protein, 486 aa, Mus Musculus
MYDNLYLHGVEDSEAGSADSYTSRPSDSDVSLEEDREAIRQEREQQAAIQLERAKSKPVAFAVKTNVSYCGALDEDVPVPSTAISFDAKDFLHIKEKYNNDWWIGRLVKEGCEIGFIPSPLRLENIRIQQEQKRGRFHGGKSSGNSSSSLGEMVSGTFRATPTTTAKQKQKVTEHIPPYDVVPSMRPVVLVGPSLKGYEVTDMMQKALFDFLKHRFDGRISITRVTADISLAKRSVLNNPSKRAIIERSNTRSSLAEVQSEIERIFELARSLQLVVLDADTINHPAQLIKTSLAPIIVHVKVSSPKVLQRLIKSRGKSQSKHLNVQLVAADKLAQCPPEMFDVILDENQLEDACEHLGEYLEAYWRATHTSSSTPMTPLLGRNVGSTALSPYPTAISGLQSQRMRHSNHSTENSPIERRSLMTSDENYHNERARKSRNRLSSSSQHSRDHYPLVEEDYPDSYQDTYKPHRNRGSPGGCSHDSRHRL

SEQ ID NO: 26 - DNA, 261108 bp, Homo Sapiens
agcccagcctcgggggccagccccctccgcccaccgcacacgggctggccatgcggcggctctgaacgatgtcctcctcctcctacgccaagaacgggaccgcggacgggccgcactcccccacctcgcaggtaccgccccctcctcccccttctcctcttcctcctcttccttcctcacacctcctccgccgccctagcgcgccccgccttcgtgccgggcgtgcggggccccagtcccgggagtcggcggccccgctccccccacccctcctccacgtccctttctcctcccgctcctcctctttctcctccttctcttcctcctcctcctcaccctccttcgggtctctgcgctcccgctccggagcccgcagcctcccccagcggatgccggggactcggaccccgcaccctgagagtctttgttaatggatgtggtgggtgcttgcgggctgctcttctcgagcatcttttcagcagtcgaggcttgcagtgggtgggtgggggtgggggctgtatttgggagtcgcggaggagacttgggtgcgggctctaggggaccccagggagcgggtccggaggcggactccagccgggggtggtcgccccgctctgcgctgcggtcctcaccggcttctctctggcccccgtgtgtcgagtccaggtggcccgaggcaccacaacccggaggagcaggttgaaaagatccgatggcagcaccacttcgaccagcttcatcctcagacaggtatgagaaggaggcgggagaccaggatggggaggaggccgagcgcgcggcgcgggggtcctggagccggccgtggcccacacgtgcgggagctgcgggtcaagcccgcgcgcgtctcttcccggcctcggccggtgctcgggctcagtccctctccctctagcctgggctcttgacgtcttcgcgtcccggcgtctccgcaccgccccgggaagttagtttgtgcatgtgtgtggacagttcggtggggacctggcttaagtcagggacgttgaatttaagagctggaaatatgtctggttgtatctttggtgcgtggagaaatgtctttaattcgtataactcgacctagagtaaccagacccctcggggccggggacctggtttgattcgagttgagatttagtggtttcttctgttttgtcctaatttgaatactcttatctgtctggatcttgggagagatcgtcaagctccggtcaaaagaaagacactgagcagaaagtttactctcactttaggaccgcttcttggattcgcttagttagggaaagacagctgtatctggttaaataggaattaacgaaggccagcactcagctccgggtctgggtgcgccttcacttcgtgtttgttttcttagtgcttgctttctcctgcgtggttctagtgcgaattgtctgtgctcgggatctccggatcgctggtaatgctcaatgcttaggtgcctttcaccttggcacaggaaattggtcctcagttttccaactgtccatgtgctgttaatgaaaccacccctggctgctgggtgctagagagatcatgcaatgagtcaccttgatctttctttggaacagaaattgtcggggtgtgtcctaggtttcgggtgacctaggaagacattggtcatcgcaccaagaggcttttatcccaggtcttcctgtgggctgctggagtgaccttgagaagttcttttccctctaggtcactcagtattgtgtaatgtgttttctaacctatgatggcagctctggtgtttctttagtgattatcatcaatttaaacatatcaacgaggaattgatatcaaaattgaactcagacctctcctaaaagggtctataaagcatatttagatgatatttattatgcagaatttcactttctgcagaagcggaaattttgactaccatttaattcagcgagcactaagcatgtacattatggaaataaatgcattttggattccgaattcattctaaaagtgcattctatcccctttgcagtatttagattatgtatttgataaggcaaacatattgtttatcttaaaaacatttttctgttatgcaactgtttgaggtcttgctggtgtttattttgtaggtgcctatttttagtggtgtttcattgttgcaaattcttggaaatactaattacacagcagttctttccataagctgtttgactaaaacttttgagttcatctacataactgcactaatgctttattcttccttccaagcacaaacaaaataatattctaatattcttactcttttctcaatttatgcccgtaactgattgagatgatgtatatataagttcttgtaaagcgtgctgctatgtgctggcttaagaaatgttaaaagtattgcatgctaaataattttgggaataatttaaagcaaagtagatttttttaaataaatatatttcatctatgaaatgggaattcattggtttgattaaatggtctaatttaaattcaggagttaattgtaattgtattatatacacaatcttatttttcggcacaaaaatagtacttaatttttttcttttttcagacggagtcttgctctgtcgcccaggctggggtgcagtgacgcagtctctgcttactgcaagctctgcctcctgggttcacgccattctcctgcctcagcctcccgagtagctgagactacaggcacccgccatcacgcctggctaacttttttgtatttttagtggagacagggtttcaccgtgttagccaggatggtctttatctcctgacctcgtgatctgcccacctcatcctcccaaagtgctgggattacaggcgtgagccaccatgcccgggctacttaatttttatgagcactttacaactcactgagtatactacacatgatctcattcaaatgacatcatacagacttctgtattggctacaataaaaataactgagggatttacatttctttgatgagataaggaaaatgattacaaatgcagtttaacaataactttcggataaaattgaaatcaccccaatgccaaaaaatattttttatgaaagcataacagctgcttacgttaacagagccttgggctggtcacagtggctcacgcctgtaatcccagcactttgggaggctgaggtgggcggatcacttgaggtcaggagtttcaaaccagcctggtagcatggtgaaaccccgactgtactaaaaatacaaagaaatttgccaagcgtggtggtgtgtgcttgtaatcccagctactcgggaggctgaggcaggagaattttttgaacctaggcggtggaggttgcagtgagccagtattgctccacagcattccagccgggcgacagagcaggactccatcaaacaaacaaacaaacaaaaacagagtctcattatttgtagaatgaccagtgatttattgatatttgaattcttgatacattggagtgatgaaatttcttggtgctgtttcacagtctttgtgatgcctttgaagaagatagtggaataccaaaaaatatatatattgctagtttctttatcatattatttacaaaaatatggagaaaagctttcattaaaaaaaaaatcgatgtgttacattggatggggaagactgggctgttggtgaagcagagaaggcagttggcaactcacccaataagacaatatttgttctttgagcttgttaaaaagtttcagtgtttctgagactatatatgcacatatgtgtgcatgcacacacatgaacatttgaattggctggaaaacaagcagactgagaaagagagcctgcttccactctgaggactgctcatgaagcccctcaggaatctttgaccttgtttctggtctacaagatttctggcttccaccatttaggagggatggaggttttggaatgaatccagggagcaaataaatggcttctttgaggaaaggtgagaagatgaagtacttcgccgctgaaaggaaagaaagctaggagtgacccagaaatgatcttcaaagtacacacaaaggctttctttggaaatgtgatgaagtgttctcactcttcattggggatgaaactcaagaactggcccaaattagaaaggaatgatgttttacagcaagaccttcctaagagtgttgccatcattggagtggctttccaaatgaggccatagaattttctttcaggagagcccttcttacaggctatttatgaatggattatctagtcatattttaaagttttaggaaacacttaagtatttgctatgtgcctagcactatgttagatattgtaggggaggaatgaaaagatggatgagacacagcccctgtactcaaagatttttataatctagcaatggagacagagatgtctacaaacagtacggtgacatgtaacaaggaacgagagggcgggctcaatgaccatgtaccccgagtatctattatatatccataagtatatctacccatgggtgtcactacacatacagtttatacggctgagtactccaagttagtcctcttcccactggggtttgaagagaaaatctgatcagagtgggaatagtttgttgacttttccttgttaagtctgctcttatgaggccagcaaagtcatacctggcctggcccctgcctgcttccagcctcatcttgagccatgatctcttagctctggacacagagtttgaacacactgtcttccctcttgccactggtcctttgcatatgctgagccctctgtgtggcaggttgttgtccttccttctgcctagttaacttttaatcttccctgagatctgggggtttagtcttcacttcctcttctaaccttcctgataaagtcagttccccaacaaggggctcccagagggccttgtgccagttttcagtagcaccaccgcttttatttaacatgtacttagatttctctgttacattctgtctccccatccgtatgagttccacaaggacagggacatgtctgcatttgatctttgtgtcctcagcatctagcatagtatatgttcaataaacacacacttgaatgaatgaagcagtggatggatggagaactaacttgatatattttaggcatgaggttctgctccaacattaaatgctttgtttagtggggagaaattgcctcctaacctcccccaaaactctgtggcttgaaacaacaacaattttttatttctgtgtactaaccagacagttctgcattgtatgatgttatatgggcactgggatggctggaaggtccagagtagcctcacacatgtggttggcagttggtgctggctgctggctgagaactcaactagagcttttggcagcggctcagtttttctccacctgggcctctcaacatggttgcttgagctcccggataatatggtggctaggttccaagaagtgaaggctgaagccacagctctcctaagacccagttttgaaagctacactgtatcacttgtcttgcaaactcaagtcaaaacaggtccaagagcctgctcagttgcaacaaaagagaaaacagactatcttttgatggggtgcaacaaggtcacgttataaaagagcatatgggtaaaaatacacacacacacacacacacacacacacacacacacaccaaaaaacagcaagtcaaattcagtgccaatagtataaacaggaatgtaaagattattcaatttatataacaaattaaagaaaaatatatgttgatttcagtaggtgccaaaaaagtatttgataaattttgtaagttaagaatagagcatatctagaggcacgtgattttaaaaaaagaagagaaggcagctccctaaatctaataaaaattatctactaaaatccacagcaaacatcacactgagcagagaaactagaaacaatatatgtatgcagcagtcagtaaatgagcaaataatgtacattggggccctcatccatatttttgcattccctggtttcagttacctgcggtcaactgaggtctgaatgtaggtgagtacagtacagtagctattttgagaatgagaaagagactacatttcatataacttttattatgacatattgttaacattgttctgttttattattagttgttattaatctcttactgtgcctaatttacaaattagacttcatcttaggtatatatgtataggaaaaaacattatatatatatatgtatatatatgtaaatgtatatatggtttgttactatctgtagttccaggcatccactggggtcttggaatgtatccctcacggttaagggtggactactatatattatactacagagtactattcagccattaaagaaaaaaataaagccaccctgcgtgtaatgatatggaaatgcatttaagacattcatttgaaatgcattcaagtgaaaaaagtaagttacagaataatgtataataatatttcattaaaaaaaaagagcatatggaatggaagatatggttgcagccattgttggaaccatctaccttggaacaaggaacctcgtattttttaaggtatgctaatcagatgatcgttacaataattcaatgaaccacactgtatttagagatctaaaacattcagatttttaggttgatactagaataaaacaagttggcaaacaaattcttggggttataatttgagcaccagttatagatatgtttctctgatgaaatgcaaattcatcaacagaaggtatatgctttgcgcatagctctaagaataatcatatgcctacaggcatgtatatatgcaaaatttatccataaacttagaatcacagaattttagaacaggaagagattgcagaaagaaaatacttcagtctcttttttcagatgaataaaacataggcccaaggacataaaggtcataccaatagataatggtagaacagacacaagggatcctggctcagactctactgtttttttcaccacaatccactttatccctgaataaacaagccaaacacacaaactcacacaggtgtggatacatgcaaggacatatggagcttattcctctcagatcctggaaacgttctgaatctgcgtggttgctgtgaagaaccatagcatcagttgaagaatttagagactgtggtttcttcccaattctatcatggatggaatttttgtttgcttggttagcttcttgtaggattattccttccaccctccagtcttctaccagttcctcccattggctgagcctctctggaagcccactgacctgggattctgggaaacaagctgcaggcagtggccctctgagatggaaagtagagcagcggagtgggaggagtggatctgagggaaacagccaaggaggggcacaaccagttacgtttatgtttatttttgtttgaggaggagtctcactcttgcccaggctggagtgcagtggtacaatctcggctcactgcaagctctgcctcctgggttcttgggaggctggtcctgcctcagcctcccaagtagctgggactacaggtgcatgccaccgcatctggctaatttttgtatttttagtagagaccaggtttcaccatgttggctaagctggggcacaaccatttttatattttagctgcatggtagacagtattgaatcattttcatctgcaaagttggaagtttttacttgctctgtaagtagaccttccttgctaaatggtgtaatccagttacaatgaactttaaaaagttcgcgcttatttcctttgtgagttttttgtgcaatgaatcttctcttgctctgatagagcaagaaagaactctgtcgctcttggcaaactgtgcttcttcttgttttggggcttaaataaattgaactgagcttatgaagaaagaaatctaattactgggtagctaacccgttaaccagtcatttttacttatgtctgagtctctgttcctgatggatagaattgcctaaatttcacttttttttttttttgagatggagtcacactctgttgctcaggctggagtgcagtggcccaatctcagctcactgaaatctctccctcccaggttcaagcaattctcctgcgtcagcctcccgagtatctgggataacgggactgccaacatgcctggctaacttttctatttttagtagagattgggcttcaccatgttggccaggctggtcttgaatgcctgacttcaagtgatccacctgcctcagccacccaaagtgctaggattacaggtgtgagccatcatgcccaaccctaaatttcatttctgtagaataaatatttatcctttagttttagaatggtacaattttattgaaacttaggtaagttctgattcaagtttttatctttctttttttcttttttttttttgagatggagttttgctgttgttgcccaggctggagtgcagtggcgcgatcttggctcactgcaacctctgcctcccaggttcaagcaattctcctgcctcagcctcccaagtagctgggattacaggcatgtgtcaccacgcctggctaattttgtatttttagacaagaccatgttggtcaggctggtctcgaactcctgagctcaggtgatccgcccgcctcggcctcccaaagtgctgggattataggcatgagccactgcgcccatcttcaagttttaatttttctagaaaattataggaagctgtgtggaaatgtaagctgaaaatgactttggctttggccctctccccttaattgctccacctgctgccccagacagggtcaaccctggatattaaggaagcagagactgccctttcaaacaaggtttaaacaaaaggcaatgctatttaatggccttcctttggccactcaaatctgggtctgacccatcttttctgggtgtggtcttggcattgtccatactcatcttcctcaaagcttggcccatttttggtctcatttctgaagctctgactcagaataaagcataaatcctaaccagggtgaacagcttgcaactcactcacattcatgaagactctacagacatgtggagagtggggcatgcaggtcccattctgctcagtgaccctctgtgtttggcctctgctttctgtctttctttttttctttttgagacagggtcgtgttccctgcagcctcaacctcctgtgctcacgggatcctcccacctcagcctacaagtagctgggactacaggtgtgcactaccaagcctggctttttttttctttttttttacttttagtagaaatggggtctcaccatattgcccaggctggtctcaaactgctgggctcaagcagtcctttcacctcagcctcccaaagtgttgggattacaggcatgagccactgcgcttggctttgcatgctttttaagccatattttggaagagagagcttcctagaacagtgccatctctctattttctgtccctttgctggagctttcttccctgcagagtgtgtgagcagagaatgggtgacaggcctcaaaacatgtatcctctgagatgatccttcagtggggtgagcctggtgtaggctgagcttctggactgtttttcacttccactgaatccggtgtgttgcacaattatttcctttgtgggctatggcaagacaaagcttgcaaagcactctttgaccacccctgggaacacactctgctatacctctgcatcttagaatacatcaatgggtaagtctcaagaagagctgggctgttatccccaacgaaccccaatccaaacacactctggttgaagcagtcagtattgtcctgcttttgcacagttgcccttgtacttcatgaaccaggaaaacaatgaggtgaatccagtgctcttcattctataagagtgtcagttctgaacttgactacatggacacatcaggaatttcacatggatttaaccatgtgtactgtgaggagacaggagggcactcagggaggtaggactgtaagtagaagccgaaattcatgaaaaagctgaattatagattcaattttaagggtatactgtagctttactgctttcaagtaacaataatgacaagctgtgtgctagggcaccctgccttcagaaatagatgaggctgatatattatcatctagcttgaatataaacagtgctttggaattccttaaagatagttctcatttctagtagagtaaacatgcgcctttgtaaacttccctattttctttaacgtgtcttttcttattatacacataaatagagcagaggtaattacttgaatctgaagggatggcattcacgatctgaaagcattagttaggtaagggctgtaaaacttattcgacggctactgaatttttctgatcatctcactgtaatcatttggatgacaaatcgtgtctatttcatttctcattttctgttctatgttgatggatgtatctttctccaaggttgcagtttaattgctgttgtagtatttgttttgggagtaaatattttgtaaacataaacttgaaaagaatatgcatttctgggttgtaggatcactagaggtggttaacttttatagtgcttactgtgtccatatattatgatgagattttaaaattccttatggaaaatttttttagcagtttcattgataacatatggaaaatctagcagtaatggaaatgcatagtaacttgtgcagataaatatatcgtcttccttttttttcttcttaaatggcccaatgctattgctaacaatttaatgctgattattgtttagaatcgaacaggtgggtaaaatgatcattgttaccagtagaatgttccttagtcactgctttttaatttgccgtgtgtgtgtgtgtgtgtgtgtgtgtgtgtgtgtgtgtgtgtgttaagtggggaaggcattctttttttcaggcatgtcataatctaatattttcatggcctggagaagaaacctatccctgttagcagtcattctgcatcctcttccccacctcccagccctaggcatccactaatctattctctatctttttggatttgctcactctggacattttatataaatggaaccataaattaacatgtggtcttttgtgactggcttcagattttttctttttctctgtctctttctttttttagacagggtctcgctctgtcacccaggctggagtgcagtggcacaatcacaactcactgcaggctcgaactcctgggcccaagaagctgggcccaagctgcctcagtctcccaagtagctgggactgcaggcgtgcaccatcatgcctggctatttttcttattttttggtagagatggggtcttgctatgttgccaaggctcaaatcttttcattaacatattgttcacaccagcccgagaagtttcagttatagcccctggtctaaatgtgtagatgctggcgtgaggatagaaatggacttgcctttccttaagtcagtgtcagagatggcttttccagtcacagtattgaataggatggatcatattcttatttattttggagcttcagtctcagctcataaagctgaatgtgtttttttggcaaaattcttttttttttttttttttgagatggggtcccgttctgttgccgaggctggagtgcagttgcacaatctcagctcaccgcaacctccgcctcccaggttcaagcgattctcctgcctcagcctgccaagtagctgggattacaggtacgtgccaccatgcctggctaatttttgtatttttagtagagaaggggtttcaccatgttgatgaaaccaccaggctggtcttgaattcctaggtgatcaggccttggcctcccgaagtgctgggattataggcatgagccaccgtgcctagcctttttttttttattttttcagttagagtcttgctcttgttgcccaggctgaagtgcaacagtgcaatcttggctcaccgcaacctccatttccccagttcaagcaattctcctgcctcagcctcccgagtagctgggattacaggcatgtgccagcatgcccggctaattttgtattttttagtagagatgtgggtttctccatgttggtcaggctggtctcgaactcccaatctcaggtgatccgcccacctcagcctcctaaagtgttgggattataggcgtgagccaccgcgcccggccacaaaactctttaacctgcatggaaatcaaacccctgaccctggacttcttgtcttcctggagtggctcccatctatagaggggggtggtttttataataggatgtgatcgacaggattaaagaaaagtatatgaacaatagaaatggttattgtcatcgttttcaataatttctagtaatagaaatatcttgggtacttacaattcaaaatgcttcctttagtttgtctagatgttcatagtaactctgctttggtaattataacatttccttcttgagaaatacaattaaggagaaagcggagtgcttgagttccaagctaaatacaatatttaagggaattattaggtatataaaactgtactctctatgtggcaggtgcttctcaattatatttgagtacttccctgggggacaaaagtcaattatcaacacagttgtgtgggagagaaataggtcagctgcaaacattctttgctaatttcagaaagcttgaggggtgatttagtttgaggatgtgttttattctttctgtttctttgttgaggactctgatagggaaggctctgtttttcatgtagtattgattgtcgtattcatttactttattacaatatacatatttctcttgctcatgcaaaatgaaaattaaactatatctaatatctttttaaaaactctgtcaaatcgatattgtaagagaaatgtgtaccatggatattactgttatgactgtttgtccattagtagagacaccaagggtgtaaaccaacccaatcaaaggcaaatgtcatatttacaagtattttatttatttatttatttcccctctttagtaagaagacaccaaagagtgctaattgttgaataaaaaacaaggaccttggtatgttttctaacaattgttttatttatttattttttattgtggtataataaatgtaatataaaatttgctattttattttaaagtataggtgcagtagcattcagtacattcactgctttttgtttgtttgtttttttttttttttaatggctgcagcaggttatcaaaaagacagtgcaggcaggcaaaacgtatgtccaacatacacgtatgttaaaaacatccgccattattgtggcctccctccacaactgtggtcttatttaaagcaacaacagcaacacaaagccagaccttggagtgccacacccaagtgtgggtttgggagctgagaagggaacaagctgaaaggaagccgcaagagctgtggagaccagccgggaccctcatggtggggatgggaaggtaggagtgggaggatgaggctgcccaggggtagttctgcccccagatacttgttttcacactgcctgactgcttttctttttcctccactgtctgaagttcagacagttccaagatgatttgggttaacaagcagcctattttaaaaagataaatgttcccagcagtctttggaggctctattcattcatacattatgggaatttgacttattgcttgcaagtatgctcattttaccatcttaacaaagcgcaccccaacaaagcagccgtgctcccatctccccggatctgtttgccctttcatgccagtgtgttccccttccctcccctctgcctgtacttgcatggcggccgcaggtacctagacttggacgtaacccctgctttcatccctccactcccttgatcatgccattccttcaccttaaagtgctttccccatttccacttgataatcttcccacttgtcaaaatccgtcttcaatattctctgtgaatctctttaatgtggcactaggtctccttctctgtcatggcccttatactgtgttttggctgttcacttattaaattctcctttgtataatctaaatgtccctatgtcccactagcctgtgggtatacattgacattatgcccgtaatcacgcctgtaatcccagcactttgggaagctgaggtgggaggattgtttgtgcccaggagtttgagaccagcctgggcaacatatcaagatcctgtctctacaaaacaaaacaaattaaaaaaaaaaaacattagccaggcatggtggcatgcacctgtggtcccagatactctggaggctgaggcaggcggattgcttgagcctaggaggttgaggctgcagtgagctatgattgtgccactgcactccagcctggttgacacagtgagaccctgcctcaaagaacaaaaaacaaaggaagcagaagcagcagcagaagttgtcatgtatccacattaatagtccatatattgctggctcacatttctcacctagagacataggaccttaacaccttccccctaacctgttgcccattttttctgagtccagtaagtgtcttaacgtgtgctcacagctcccctgctcattgatgtctactgccaccagcctttgaagaggcttctgctgcaggagctgtgccttcctcagtgagaacacagcttcttccttctaaggtgctgtttttcagcactgtactcttcagcctccctggacaacctgtgttccagactttcgcaactctgggtcactctgtgtcccctgggtcctcgagtgactcttcttgtgcccagtgtctcccagattcttttgtaaagccagcttctgcagcatgacctgcatctctctgtggggaacagacatcattcagcctctgccccgaactgcacctaaaacctgcttctagcagtgacttttgtactcattcatgtcgacccacacgaactgatgtagacacaaactcttcgtcctcttttaggctcagttacaccatactcacagtaatttatatatttaaaatatttttgttttatgcatttgtacttgtggtggaggtggagcagggagtaaaaggaggaggaggaaaggagaaggtgatgtcagggcctgaagcgttttcaaagttagtgcaggcctgagtaggatatcggaatgggatccttgggacagaggagggcactggtgcctgggcagaaagagagtgacttgtggaagatgctttcagaaagggaagtggatgaggatcaaacttggtctatttcaaactttattcttgaagtgtatctgataagaatcttttcattgcaagcaaacagaaagccagcacaaattggctaccgcaaaatatggaattattgactcatgcaagtgaaagctcagaggcaaactttatacttcagatattgtatgttccaaagttcgtggcttcatcagcagctctactctttctgtgcggttcatttaacactgtgtgttcttctgtgtgctggtctaggcctcagtttagcacccgttattgtggtagcagtggccacagtgattcaggatctcccatttatccacgatcctgtccagttaggcttccttacaatagttccagcagaataaaaaaggagaggtgccttctttcctccctccttccctccttccctccctcccttccttcctcctcccttccttccttccttccttgctttccttgcttgctttctttttgcagctaatggggctttaaatactgtccctggcagcacacacacacatgtgtacacgtgcttgtgtgcatgtgtacacacatatgcatacacacacatacatatacacatttcttgaatctcattgaactgaaatggctcataaaccaacactatggccagggggactgtcttaaggcagcagttggctacctagagatgagattgaggtcagccccacagtggctgagattggggagggcagtttcctaagggaattttggacccaggcaggatcgtgggaacttcttccttctgctcctccttcctctggtaccacaactttcagtcacttcatgagttagatattgttttaagtgtggtaaaataaatataacagaaaatttaccatctttaccattttttagtgtacagttcagtgacatttaagtacattcacatggtcgtgcctaccaacatcaccaccatctatcctaaataggattttgtggactaatctgggagcctagctttctgttgtaacaatttattttaatgggaaaatatgtagcaagtttcaaataactgactaaacagtgaagttctgggacaccacataactattgatacaggggagactgcctgaatgaatacttcttaaggcctctgttttccttgttgcaaaacgggggtgagaatggggaggactaggtaacctctaagattccatcacgttctaatattataggactttatggctgtgtccacagatgtatgtggtcaactcattcattttggtagaatatactgtacagttagctctcaggtctgagggttctgcaggctgactgcgggactcaagcatcaaggactttggtatccatggagggtcctggatccaattccctactgattctgaggaatgactgtattttgcagctttggcagaaagcctttgtcacttaagtgctgagatgaactcatacaacatacggccattcagtatcaaatattggaaacttcagataaggacattcttttataatgtagcaaagagatgatgtggagtttacaggaggaaagataatttgggatagagctggaatttataactctttcaagtatatgcatgcagcatgaaaggatgtgcaaagaatagagtgggctgtcaaggatgaagtatttgtgaaatgtggtgagatggttctcagataagcatcctggaagttattaagaggaagtctgctgaggaatagtatagctcctgctattataattattatagccaccaggaagaacaagtagctaatggggctttaaatctataataaagaataacacaagttgccatattggaactttgctgaaggtgagtggaaccacaaggttgattctcatcatttgaaaacactgcattagggacttttaatactgactttcctgcttactccgtgtttgccacgggcctgatatttgcacatacagttcagcaaagttgcctttattgcaaagatgaggtaggaatttctgtttttaagtaacattaactatttaataagtagattctggtggatatatttttttaaatcatatgtcgaagcactaactaatgtgatagtatttggaggtgcggcctttgggaggtaattaggtttagatgagattttgagggtggggcccctatgagggaattagtgctcttgtaagaagaagaagggggaccagagctctctctgtctccacaatgtgagaatatagctagagggtggctgtctgcaagccaggaaaagggcccttactaagaaccaaatctgtcaggatcttttttttttctttttcttttttattgacagggtcttgctgtgttacccaggctgaacttgaactcctggctcaagtaatcctcccacctcagcctccaaagtagctaggattacaggcatgcacactgagcccagctctctgtcagtatcttgatcttggacttcctagcctctgggactgtgagaaataaactcacattgtttaagttacccattctgtggtattttgttacagcagctcaagttgactaattcacttggtaagctggtgcacttgactattttccttctcatccttctagtcagtagcacatgctccttattcattatgtaaacattatatttatatcctgctttattctggaaatgacttaagttagcttgtgtatgatatcacaagagtgttagactgttggcattgctataaaagaatacctgagactgggtaacttataaagaaaataggtttattttggctcacatattttggcttgcagtctgcaagctgtccaggaagcatggtgcccacatctgctcctggtgagggcctcagcaagcttccagtcatggtggaaggtgaagggggagcagacatatcacatggcgagattgggagcaagagggggaaggtgccacactcttttaaaaaaccagatctcgcatgaactcaaagcatgaaatcactcattaccctgagcagggcaccaagacattcatgagggatatgcctcatgacccaagcacctcctactaggtaagccctgcctctaacattggggatcacatttcaacatgagatttggaggggacaaaacatccaaaccagtaggtgaatacaatgaactgatggaaaaaatacagatgagacagagtacacaaaatatatgccactaatcttattcactgatttgagtctgaactttctagaaactacctagagaggaaagcaaggtcatttatgagatttttcaatgtccaagggtaaaagtaaacttgtttaagaaaactacacaaatttcccaccctgaaactagagagaaacttctcccatgttctcatagagttgacactgtataagacagtaaattggccaggcgcagtggctcatacctgtaatcccagcactttgggaggtcgaggcagggggatcacgaggtcaggagttcaagaccatcctgactaacatagtgaaaccctgtctctactaaaaatgcaaaaaattagccgggtgtggtggtgtgcgcctgtaatcccagctagtcaggaggctgaggcaggagaatcgcttgaacccaggaggcagaggttgtagtgaaccaagattatgccactgcactccagcctgggcgacagagcgagactccgcctcaaaaaaaaaaaagacagtaaattaaaccctgaataattaaaccttataattctagagttgtttcttatcatatacttcaatatatagattatacttctcatcatgctggagtacaattcaataaaagcaattatgtaggagctattgctgtatggttcagaaatgcctgtgattctcaaccttggctgtacattagaattcccatgtccaagccacatcccagcctaatgatatctggatttcttaggggtgggactcagacatcagcctttttcagaactctaggtgatggatgtacttttctggtctgatgtaattcagggggagattttacttttatttttttatttttttgagacaggatatcgctctgttacccaggctggagcacagtggcgccatcaccgcccattgcggccttaacctcctgggctcaagcgatccttccactttggtttccaaggtacctgggactataggcacacaccactgcgcccagctaattttacaatattttgtagagacagggtttcactatgttgcccaggctggtctcaaactcctagactcaagtgatcccgctgccttggcctcttaaagtgctgggattacaggtgtgtgccaccatgcccagccaagcagggagattttagagcagctcttttcagccaggatttatcagtcaggatacattaggtgatgttgcaataataaatacttctctaaaacaataacaacaacaacaacaacacggccgggcgtggtggctcacgcctgtaatcccagcactttgggaggctgaggcaggcggatcacgaggtcaggagatcgagaccatcctggctaacacggtgaaaccccatctctactaaaaatacaaaaaatcagctgggcgtggtggcgggtacctgtagtctcagctactcgggaggctgaggcaggagaatggcgtgaacctgggaggcggagcttacagtgagcttagatcgagccactgcactccagcctgggcgacagagtgagactgtgtctcaaaacaacaacaaaaataacaacaacaacacaacacaggtttattttgcactcactctgcatgcctcttggtgggttagctggggttaactcactgttctttctccagtagagcaggcaccatgtagaacattactgtttgctgcagaagagggtgtgagagacatggtggaccacacactggcttgtgaaactctgcctgggtctatgctaagctgctgtaatactgaaaccaaaagatcaatatatatttctttgtcacttaacagtctacaagaaggtgggcagttcagcgtgggtggttggctgtattccaagagatcagtggtccaaggacgtaggctgttgggtggctttgccattttcaacatttagattccatctttggatccagtgtgacccctacagtcattaccattttctaggtagctcaaaaggggaaaaggaggataagcagcttcctttttaaagggatgacccagaagttaaacagatttcttcagctcataatccattggcctgaactttgtcatgaggcgacatctagcttcaaaggaggctgagaaatgcagtctctagctgagttgccatgtgaaggctaaaaattgggacagctctatttctggaaggaaggagagaatggatgttggagccagttatgcagactatgcctcatgatgataatagtttcaaagtttggttttcacgtagaagcatttccttcaaatgaaattgtggatgttgtctttggtagtcgacatatttggagatgctttgatgaggtgaggggatctgtgtggaccgccctcccagtttcctcctcatactctctgcagcagttctagaggcatctccagggaccctgagggctctatgaaaatcatggatgcagatgaagtgatgatttacatatgcagcagaacatcctcccagaatattgttcctcgcagaaggactttggattgatattgaaaatggaactgcatccttctagtcagttctatcgcaaaaagccatcccaagcccagccacctccctccatcgctcctcctgctgccctagttctcagcttgcgccaccgccgtctctcttctgacctactgaaagaatctccctctgtccatatgccagcaggtccattctctacgcagctgccagagttatctttttaaaaaggaaatcagatcaggccatttttctgttttaaaaccctctaatggatttcagttgggtttaaaatataatctagattcattattgtggcctccaaggctctgcagtgatataactcctgtcagactctcttacttcatcttcgtgtttcagcttactaacccttctcctctcagtctcgggttttctttatgttctttttttgagagggagtgtccctctgtcgcccaggctagaatgcaatggcacaatcttggctcactgcaatctccgcctctcaggttcaggcgtttctcctgcctccagcctcccgagtagctgggactacaggtgtgcaccaccacgtgtgactcatttttgtatttttttgtttgtttgtttaaaaacagagtcttgctctgtcgcccaggctggagtgcagtggcgcgatcttggcttactgcaacctctgcctcccgggttcaagtgattctcctgcctcagcctcctgagtagctgggattacaggcacgtgccaccacacccagctaatttttgtatttttagtagagacgggatttcaccatgttggtcaggctggtctcgaactcttgacctcatgatccatgtgcctcggcctcccaaagtgttgtgattacgggcatgagccaccgtgcctggccaatttttatattttagtagagacaaggtttcgccattttggccaggccggtcttgaactcctaatctcaggtgatccacccacctcggcctcccaaagtgctgggattacaggcatgagccactgtgctcggctctttatgttcttttaataagccaagattagtcctgcctccaggccttagcacttctgctctccttctggaatgctccttcctgagctctctagatggctggctctttcattccccaacccaaacattacctttttagagagacctcccctggctgctcagtccatggcggccagcccccctccctgcttactctctgtcacattccattactatcagaatttaccttctgtagttttcttttcacttactcatttctgtcaattctcactggaatgtaagctccaaagaggcaaagaactggtacatccttgtcattgcactttccaggttgacagaataggcatcaggaacgccatataagtttagtaaatattaactgaaaattgaacagaatgacagtgacttttgagattcagtatctgggtaggtcctagtctttattatcagctgagtgaggtattacacaaggatagacaggatgtcttcctttaagaattaagatatcttttaatacgtgtgcctgaaaagaaggcttagagatgattcaagggctgagggtcttctcagaaagtaatttggagtttacctgaaactatgtaaagagatgtccatggacccatagtttcgagcccaaacacaaactacagtgacttcttgcatggacaaaaatgaaaagcggccaggcgcagtagctcatgcctataatcccagcactttgggaggccgaggcgggtggatcacaaggtcaggagttcaagaccagcctgaccaacatggtgaaaccccatctctacaaaaaaatacaaaaaaaaaaaaaaaaacccaaaaaattagccaggtgtggtgtcaggagcctgtaatctcagctactcgggaggctgaggcagagaattgcttgtacctgggaggcagaggttgcagtgagccgagattgcaccactgcactccagcctgggtgacagagctagactctgtctcaaaaaaaaaaaaaaaaaaaaaaaagaaaagaggtggtaatcacatgtcctccttattagctcctgccaaggcctactagctttcagcaagttccttcctaatctactttgcaaaaagaccttatgacaaaatgcataccccacacactgaattaggtgacaggatttcagggatattagctacagtttggtgaaatgcaggtgagcaaatattttactctcgttttgtttggatgcctcatccttgacctgcttcaggacagtttccaccctaatagagagcatccagggagactgtgggcagcactgactttggcctcagctcttaatcttctggtggctgatgctttggtctggggcccagtattcgatgcctgagttcctgtagatgagatcttttagtcccagacctcctcaggaggcaaagacttattgggctctggaatttgagctggaggcagggcaaggctaggcttagcaggagtctgtgtgtgtggctgaggggtgtatggctcagctgaccagacctgaggctctcaggccaagtcaaacgtgggaaagtcagcagagccagcaacagtgagtccacactgcccgtgtccttcaggttggctggtctccacctggaatgctctcccttctgttgctttttctggtgactcttaactccttttcttcatgattgcatatatgtcacagcctctgtacagcctcatctgacactcctgggcaggatttgtttcttcctcccttaatacgctcagagtaactctcacattgttttgcagtgatatgtttacaggtctctctcccattgacagtgaacctcccaaggacttggttgtgacttaattttcttcagaagcaacaccagcagagctgttgatggaatcagttgtggcatcaggtgaatggactgagtccatgttctatcactttctatttgtgtgaccttaggcaagtaataatgtgaaataaggatgataatgcctgccttgtaggatggtgtcagaattttgaaaaatgaaataatatatatagatattggatgcaaattattctatttaaaaacacatctcactgtagctcttcttttcaagcagggtggtggccataatatgtatcggtatttgccttccactttcagagactggtgggaagtctgacattttaaagcctctgcccgtttctctgtttgttgggggaacatcctagagtgatgatggtaatactggtgatggcagtgagggtggttgtggtgatcatggtgatattagtggttatgatggtgctgttgatggtcctgggtgtcagggcaggggtggtgatgatgaagatggggcaatagtggtgactgtaggatggtgatggtgcttggtaagggttgggtggaggtgaaggtgatggtgatgatagaggtggtaatggtgagggggtgatggtgatgatagaggtggtaatggtgagggggtgatggtgatggtagaggtggtaatggtgagggggtgatggtgatggtagaggtggtaatggtgagggggtgatggtgatggtggagaggagggtggggacggtagtagtgattatgctgtggtgacagtggtgacggttgtggtggtgctgctggtggtgatggtggtggcagtagcggtaatggtggtgatggcggagaggagggtggggacagtagtagtgatagtagtgattatgccacgatggcttggtgatggttatggtggtggtgctgctggtggtgatgatggtgatgttggtgatggcggagaggagggtgggaatggtagtagtgattatgccatgatggtagtggtgagggtgctggtggcggcgatggtggtaaagcggtgatggtggtgatgttggtaatggtgatggtggtattggtataaatgggggggtgctgatggtagctgtggtggagatggcaacgatggtggtggtgatggtggtagtgttggtggttcttaccctgggttcctcacctctgttgctcagcctgcctgttgggattcatagcctcctggagtgatgactgcataacattgttttcttttgttttgccattcctcccctgcctgcctgccttattctgaactcagtccccttcacatgggcttacctaggactcttcagctgattctcagcctttgaccctggacaatagctttggatccagcacagcatcctatcctgcctgcccctatcccctgcctcttacagtcctgcctcttctggtcctacatcactgcttttcacctagaagctagggacatttcctcattagatgaggccgttgcattgttgtcaaataagagcgtttaatgctagaggattgcatttgttattgaagggaatgctccaagttctgagagccctgctcttggagaacacagctggcagtggagaatggactttcttttaagagtgaaagcagattgacaaatctgcccaccattatctcttttgttccatttttaaaatgtatttttaattatttttgtagattgttttcattatcctgcactgttttccaatcccttaacattacttaacctgtttatttaaatacttagcaatctctgcttgttccaattcataatcatcccattcttatgctaacttatgccagccttggggatggcactagaatctgggggtggtggctaaattctcatgtaaacatagcaaagcacgattgccagtttactacacaggcgaatggcattgagctaaagcattcacttcaaagaggaggatgcttctaggtatattgaatttggcatggggtgatgggtgagggttggagagggagatgtgtttggaccttggatgacaaggaagatggtctttccttctcgactggctcccttcaataaggaaatcattatgctggatttgagatgtttcagtttgctgatagctgacttccgtctgctctcctggaccttattctctctgccaactgcacaagtaaatctatatagatttcttcctgatgccatttgtgatatattgctccctgaaagcattttcctgatattttatgaaaatccttgaattggccctaaattctggtagtagaaagagcatgatattttcagcaaaagcgtaagttcaaggtctagcttaaccatatactagaccaagccactgaacttgaattttagtttccaaccctataaaacagaggtaattggccaggcatggtggctcacgcctgtaatcccagcactttgggaggccgaggcgggcggatcctgaggtcaggagatcgagaccatcctggctaacacggtgaaaccccatctctactaaaaatacaaaaaaaaaaaaaaatcagctgggcctggtggtgggcgcctgtagtcccagctacttgggagactgagacaggagaatggtgtgaaaccgggaggcggagcttgcagtgagccgagaccatgccactgcactccaacctggacgacagaacaagactctggctcaaaaaaaaaaagaaaagaaaaagaaatggaggtaatcaacttctgtgcctcatcataaggttttcataagccttgtttgagatattaccagtgaaaaaggtttataatgttaaaagattactataactgttactaaatttgacttacgatattatcttgaggcatgaatgctctttaactaggaattttgttgtttaggaaaagtaagtattacagatctttgtgaaaataattatactcttaaattgcttttcatacacacatttccttaaaatttaatattcattaagctcccctagccacgttggatctctcaagttgtcttggagccagctccgtgatggacattcccccagatctgtgcctccagactgtgctcccttggtctggaatgatggtccccattcttggctggtgtcctactgctcatctctcaagccctagctcaaaagtcacttctctggaatcttgaactaactgctccaggcaaaaggagtcattctgacatcttacagctccttgttcttatctctaaactgcccctctcaattattgtcatctaactgtaaattaaacctgattgcaagcttcaggaaggcaagaatttttgttgcatttcatcactgcaattcccaatgcctagaactgtgtctggcacatagtgggtgctcagtgtaaacccttatggaataaatgaatgaatggatgaatgaatgaaattaaatcacctctaccagttcctaaatggcaggagtggtttacattgatgtttcttacacattcatcttggtcaaggcctggctctggtatatttgcactatgtttgttgaatgaataaatttctggattaggaaatattagatgcctttagaaaatagaaggaaaaggctaaatattataaggtactaaagataccattgtacttccacactataattgcttacattgcataattctaattttgttttcgggttactataggcccaattgctatttttataaaaacctgcaataaacatctggagcagtttttaaaaaccaaaccaaccaaatcttaggtttcccttgactagtttttaatgtaaattcttaatttttttccctaaaaattggcataaccatcattaacatagaacatgccgagaggtttcatgtctttagcagcctaatgtgtagatattaaaagcttccccttaataagaattactgcaaattcatgtttagtatcaaaataatgatagccccaaattttgcaaatggctgtttgccagatcttctgtaactctctcacccctgctatgtttgaggaagtgtttctcatagtaaggttttaaaaattctacttacaaaattatatatcctcttcagcagatgggctgaccggcttacagtctccatggtaacaaggtttctgtatttttccccctttttaaaatagcctaaagtcacagaagagaacttagatattaatagcctaagaaatttcagtgtgaacaacagttattaagtatacagcctttgattacttgtttcttcatccagcatcatttgtgatatatagcaactgtgattaagcatgtatgaatataagttggctgagtgcagtggctcacgcctgtaatctcagcactctgggaagccgaggcaggcagatgcttgaggtcaggagtttgagaccagccaggccaacatggcgaaaccctgtttctacaaaaatacaaaaattagccgggtgtgatggtgtgtgcctgtagtcccagctactcaggaggctgaggcaggagactcgcttgaactcgggaggcagaggttgcagtgagccaagagtgtgccactgcactccagcctgggcaatagagtgagactctgcctcaaaataaaaaagcatatatgaatataattttaatattcatgcagattaggatgtgccaattggtttgctgaaatgattaactattggatacctgtttaaattagcctctctttcccaacttcctttttgctagccaaatcagattatgtactacacttcacttaggggtcaacagcatagtaatagtgcattgcattatttcattatcgatgtgaaagacaaaaccaagcctgtcttcttcttgtgtggtttccgtgaacacccatttttgtgttaagtgtagtgtttttgccaactataaaaaaagcatgtatgacttcatggggccacagcccatgttgacttgattgggttctagtatctttgatatgcataaagaattacaaccccaaaccagctaatacataaatgattctctaaggcaagtacactaataaagcatgaaaagatattttaaagagacgggtatatttggtttgctaaaattcttgcattttcctaagaagtgccctgttcttgatacagtgtggtttgtacctcccacagaaaaatcaattcttatttttggattgacttttaaatgtttatttttgtgaagtcatgacatattcttgcttgtttagctgtaaatattgatgaagttggccaggcgtggtggctcacgcctgtaatcccagcactttgggaggccaagacgggcggatcacgaggtcaggagatcgagaccatcctggctaacacggtgaaaccctgtctctaataaaaatacaaaaaaattagccaggcgtagtggcgggtgcctgtagtcgcagctactcaggaggctgaggcaggagaatggtgtgaacccgggaggcagagcttgcagtgagccgagatcgtgccactgccctccagcctgggcgactgagcgagactccatctccaaaaaaaaaaaaaaaaaaaaagattgatgaagtcgttgttctatcaaaagatctagaataaaggagaatattttctgtccaatagcagaaaattaagaaaattaagcagacctggagtgcctggccctgcaatgggctctttttaatatgtgattggagctgaaatcctatgacaagatcacctgagagtttcatttatatatctgttaaaactttttcacctcatttttccactgttgtgtctctatatttatttactttgctgtcagctgatcaggctgagctataaaagacccagtgtggagggtatgtgtgaaggaagaatttgattctactgaaaaaaaaaaaaaaaaaaggcgtgttctttatgtgcttgtgatgagattcagtgggaggttggttgggggtgagtatctggtgatgatgctcttatcactgccacttctgctgcaagatcaatttcctaggaggctttgaggtcttgacccacataaaaatactcctcccctgccctccaaactattgggctttgttttatcccatgtttctgtgatagcatgtatgcaggtatttatttgggaattgattccatggagtgggattggagcgggtgaagaactaatatcagaatatattaacaagttggccagtgctgggagcaattagtgattggtgataccatgcctctctgtgaagccccatgaaatgtggatcagaaatgtccaccctggacagcggtagggggaagcatttattcaccggcatctgttccccattgactgagagtagcctcacaggggttagctccctcatactacctagttgcacatgcgtgagtgccaagcatccggcacctctttgtggccagaaagccaaaggtcaccgcctcagtgtgaagctggtcaaagcctatgtgggcctgattattgccagtggctagaggggtagggcctagaggacatgacatggttcccaaagggaccaactgtgcatctcaaagatatcaacatctctttcatcagttcacttttttatagcctctgtgaaaggagaattctcctttctatccttccagaaaacataggtgtggattcttcggtctcatataataaatctatactaatgatcttaccaccctgacccttctaatcacctcctcagatccagcatctccacctcattaacaggaaaccatcttcctatccaggcttcttggagccattccatctgggtgttaggactggtttcaggtgtccttgtcaggagtttgaacccagagtcatggaagagtacccccatatcaataaattattctttatccaacttagcattttgtagcccctggtctaaaaccactcccgatgatcttcctctggttcccactgatacatattcctttgatgaataagcagtttacttctgcagcaggaactatatttccctgcttgggctgtgccgggacctgactgtagttactggctcagaggcaaagagattaactggcagcagatcttaaaaaggacaaaaatttccttgttaggcagctacctcatgtgaagactttgcagggtctctaggcaaggggatattgctctcctctagcaagaggaagggagagttgctaatggtttggagaattcaaaggaacctgaggattaaagattctcagatgtctgcccagatgccctgattccaggtcttggaatcctctcttttcctatgagggctctgactttgacatgagagacgtactgagactgtgccttcattttcctttgcaggtctttcagctttatagttagttcctgagcctgattttcagccccatggctgcaggcaatgagtcaacctaaacactgtcaaggaggcctttcacaatcctctttgagttgatagttaatgcacctaaacatataattttaatattacctcttcaaggcttccaaagcagttaataaaagccatacaactccatgattcttataattaccattgaccctatgtcattcaagtaccacaactaccacttaattcattatttccctttccatatgtacctcatcccagttcaccacaggtaagagttttagtagatgtgatgctactgtatgcctgcgatgattgctatcctacttaccaccagcaatagggcgggtgatctagctccatgatccagaggggctgctttctaaggccacttgcctttatagctcaagtccctgcaaaaacagatcctgagataattgcttgcattcaggtagtttatttgggatgagatcccaattggagtaaaggacctaggaagagaaaagggaaggagaaaaagccagtacaagaatacattatcaggctgggcacattggctcatacctgtaatctcagcactttgggaagctgaggtgggaggattgcttgagtccaggagttcaagaccagcctgggcaacacagtgagaggcacccccccccacacacacacacatctctataaaaaacaaaaaagaatacattatcaaactgaccactgctgagaatactgggtacttgatctcaggcacttttgaggagccatataaaatatatctcagaactgtctgccttggggctgacatgcagaagcatgtgtccatttgcttctgtccccattggccaagagtggcccacaggcatttactcccctgcacttcttttttttaattaattaatttatttattattatactttaagttttagggtacatgtgcacaatgtgcaggttagttacatatgtatacatgtgccatgctggtgcgctgcacccactaactcgtcatctagcattaggtatatctcccagtgctatccctcccccctccccccaccccaaaacagtccccagagtgtgatgttccccttcctgtgtccatgtgttctcattgttcaattcccacctatgagtgagaatatgcggtgtttggttttttgttcttgcggtagtttactgagaatgatgatttccaatttcatccatgtccctacaaaggacatgaactcatcattttttatggctgcatagtattccgtggtgtatatgtgccacattttcttaatccagtctatcattgttggacatttgggttggttccaagtctttgctattgcgaataatgccacaataaacatacgtgtgcatgtgtctttatagcagcatgatttatagtcctttgggtatatacccagtaatgggatggctaggtcaaatggtatttctagttctagatccctgaggaatcgccacactgacttccacaatggttgaactagtttacagtcccaccaacagtgtaaaagtgttcctatttctccacatcctctccagcacctgttgtttcctgactttttaatgattgccattctaactggtgtgaaatggtatctcattgtggttttgatttgcatttctctgatggccagtgatagtgagcattttttcatgtgttttttggctgcataaatgtcttcttttgagaagtgtctgttcatgtcctttgcccactttttgatggggttgtttgtttttcttctgggttgcaaatgcatgagtgtggagctgctcctaagccttagttggcatttgaaagctctggagcaggaggtgaaaggtatgtggaagggggagagggaggcagaggcaaggtgctgtctgattatacctgtttgaatctggttgagcctgcatgtacgtggccacgtcagcagaggctggagtaagatgtggggctgagaggttgcgaagtacttgaagggcttcctgtataggctttattccacttgattgatttaagatgcattcatttattgtgctcactaaatgtatccacttttcttctttgttttctattatttctgatataaatatatttaacttttgtaaccaagaatagtgttactttaaaaatattatacccccttaggccagatgtggtagcaaacatctgtagtcccagctacttgggagtctgagacaggaggatcgtttaagcccaggaattggaggttgcagtgattgcaccagtgcattccagcctgagcaacagagtgacaacccatcttaaaaaaattacccccttacataaagattttaggcttaatgtgaggacatataggacaacctgaggaaaggacaagtggagagtgtagaagagagagaatcaatgatgtaagtaaatttctgcttgctgttactttccaagtagaatgtaggaaagttaaacactatagccaagagcctgaatttgtcctgtgtgaagtccttcaagacctagtcaaagtagcacattgctaaaaccttttcttcccagcactctttctttccctcatacttcagtgggcgggggtgatccatgtgactttagcagatctaaccaagccctaagtgaagttccctggggaaaaagcatgtaacttctctctctctctttttttttttttcttttgagatggagtcttgctctgccacccaggttggagtgcagtggcacaatcttggctcactgcaacctctggctccgggttcaagtgattctcctgcctcagcctcccgagtagttgggattataggcgtgcatcaccacacccagctaatttttggtattgttagtagagacagggtttcaccatgttagctaggctggtatcgaactcctgacctcaaatgatctgcccacctcggtctcccaaagtgctaacttctcttaaagttggaactattctgggtttgggttgggggacagacatgcaagtaaatcacatttaccacacaagcaagagtatgcatggaaaggtgaataagaatcagtccttgccctaaagagccattccttctgctggtcttgaagtttcataggagcgctgctgtgtagcagctgattgtgaactcaagggtcaagcttctctggatttaatattgggggtctagtttctctctatgacaggtggagaggatttcttggattttatgacaatctagacagaatttcttagattttatggtctagtttctttgcccggatatattttgataccagtttttgggtaactgtcttaggtgataattatgaaaaagtctgttttctttcttacctgtatttattatttgaagaacatatgtatgtactactttaaagtacattatagggccgggcgtggtggctcatgcctgtaatcccagcactttgggaggccaaggtgggcggatcacttgaggtcaggagtttgagaccagcctggccaacatggtgaaaccctgtctctactaaaaaaatacaaaaattagctgggcatggtgtggcgtgcctgtaatcccagctacttgggaggctgaggcaggagaatcgcttgaacctgggaggcagaggttgcagtgagctgagatcgcaacactgcactccagcctgtgtgacagagcgagactccgtctcaaaaataagtaaataaagtacattataaacattctggtgcatatacaaaaatgaaatattaaagaataaaatatagatttgaatatggaaatagagacttgaatattttcttcctgcactccagcaaatgtttttgccttctccctgggctgccaaagtccacgtgggagacatccgattcagatgtccatggctcccttcatgcacttcaacaatgtgaattttaagagatgtttggacccatgtactcaccgttagacatagctagacctaaactaacctctgtgtgtagttatatattgaagactgtcttcctaacatttcagaacttctgttaatttccagtactctatcattcacaagactgttattacattgtctgctgagaattacaatgaatttagaacaggggtgtcagcctgtgttggcagataggttttgtttggctcatcattcagaaaaaaataattttgaatgactgccaagatttgaaagttgggggattttgtacacgagtctgaattttcaacttttctggaaaaattgtgaggaatggcaaaactggcttttcattcttctaggaagacattcggagctgatgggtggctgcctcttttaggtaggcatctgccctcttggtcctcattaaccctgccccccgcctcacagccagtgtgcttcactcacttatattacttatgtgtcttctgtagaatttaagttgtttgctttggtctaaattttgcaagtgttaatattaacacaggcttcttgaaattatgtaatgtgcagaaaactcttcaaacctcaatctgtgaggagtgctgtttacctggtttatttgctgagaaccccaggagcttgattgcatgcacaggctggagctggcttggtgcagtgtgattttccaaacagcctctagagcaagattgcctgggttcaggttctgactctgctgttttctaactgtgggaccctgggcacattaatcactctctgcctcagtttctttatctgcataatggagctaataaatgaatagatgtaaaataacaggctaataacattgcttggcacatagtaagcatttagtatgtgttggctgttatctttaatttaccaattcctataattgggtattttgtaatgattttgaacagatttggaactgttagaggctatctaaactggttgagaataactaaatttacactgtagaatcatctatgtacagttcactgaacagttaactgattaccaatatatgtgcaataaactcccagtgacattgcgatatgtctggaatggaatctaatcccttctccctaagaggttagtgaattccttagtatggagcagctgagggaattgtctctgtccaagtccatctggatgcttctgactcatctgctgatcctcctctgcgtggatgtctggcccacaccctaaagctaatctgagtcccaaggggcattttcttgtccaaaagttgatatgctaatttcagagaagtgctagcctttctgtctaaaattgctcacagttcacacctcatgtcttgtcttctgctctgtttccttcctaatttggcattacacaggtctgtgcaaagccagactttaaggaagttccctctcctcccgtgtcctctgccaaatgcttcccgtctgtcattggcaaaggctctgtcttgccatgatgggagaggccaggagctgctccaaagctggtggaaagagagccgttccacgttcagtgctccgtgaagagctgcttccactattgagatggggaggtgattaggtctaggtggtttccagtttggcttagccacagagatcttgcccattctgtgtatgtacccccttggcttgctttaggaatgcatgtatctgtcagaagtgctgtttttctggaaatttctttgttctggtggtttaaagcaactatccttatgcaactgacacagtacatagagagactggatcaaaaatgaaataaaatgatttagaagagtggtcagtgaagtgttggtctcaactcaatggcggtgtcaactcagtggtgtgactggactggcctctggctgaggggatgttcacagtctttgctgcctgaatactgtttttcctaaactctctagctagtttttttttctatctgttgtaatgcattaggaattccatgtattagcatgtgtttattcactgaattaatgagtagttaaccaaaaattaggggaaattttcacaataaggtacatagaaagtgaatttatctagtaatcttaagtatttgctgaaaaagaattactcagggtatcaggaaatccagaaagcattcctaatcattattattattattattattattattattattattattttgagatggaatctcactctgtcacccaggctggagtacagtggcgcgatctccgctcactgcaacctctgcctcctgggttcatgtgattctcctctctcagcctcccgagtagctgggattacaggtgtgtgccaccacacccagctaatttttgtatttttagtagcgacagggtttcaccatgttggccagactggtcttggactcctgatctctggtgatccgcctgcctcggcctcccagagtgctgggattacaggtgtgagccactgcacctggcccctaatcattatttacatgatcattctttattctactgtttgagatgacagtcatatctggaaacattcataacttttttttttttttgctttgagaagcagaaatcacagtggctagatttggatttttgaatttacatggtttatgacttgagcaagtcatttaagatctatgaaattgatgtaatatgctctttttacttcacaaagttttgggaggctcaaataagcctacttacttaaagctgtttttaaaagtaaaatgtgatagattacatgagttatttttgcagtctagatgttactatagtaaatattcaattagtaatcatttgctaaatttggacaatactaattacctcttttctctattttaaaaatttcagatatttttaaaaactaaattaatttttttttagagacaggatcttgctctgtcacccaagctggagttcagtggcacgatcatagctcacagcaacctccaacccctgggctcaagcaatccttctaccctagcctcccgagtagctgggaggctacaggcatgtgccaccatgcctagctaattgacaaaaattttttgtggagacgggatctccttatgttgaccaggctggtctcaaactcctggcctcaagagatcctcccacctgagcctcccaaaacgttgggattataggcatgaactatcttgcccagccagttttaaatatttttgattaaaaagaaatatatgttcattgcaaaacatctgtgaaacacagaaaagtataaagatcacctataatatggcaactgctatatattaacattttgttacatcttttcatattttctgtgtatatgcacacatagatatagacaatgcttttttttacaaaaatttatgtattgttttgttatttgatattttcatataagactgtattgtagacatcttttccagttaataagatctagttcatcactgttaatctgatgtgtagatgtaccgtgatgtatttaacttgcccctgttgctggagatttggttttccaatatcttatattttcttgatgctgatgttttattttcttatgataaatgtatagagttggagttcctgggcagttgttttctaagttgaaaatctaatgtacactgctccctcaccccttgacatgagttgtggaatagctaataatgtagattgtatgcttttttacagtccttgatacattttgagcctcatagcatgctataacattggatttatcagagcagtagttttccttgaacctattcaaaggaggtatgcttaatttaaaaaatctgaagacctcattatagcatagttttacttgtagctcagcagtggttctcctgtgaattaataatgcattaataattttaaatcttttaatgtaatggtatgaaatgaatcaacattcagcaaacatttactgaatcccaactgttgattaactttttactacacaccaaaggctataaagatgaataaaactcaagtcattttccttgaaaaacagtctagtgtgggagatagatgtgtaagcaattaattatataacattgtattagtccattttcacactgctataaagaaacacccaagactgggtaatttataaaggaaagaggtttaattgactcacagttccacatgtcttgggaggcctcaggaaacttacaaacatggcagaaggtgaaggggaagtgaggaccttcttcacatggtggcaggagagaaaagagtgaggagtgaagagggaagagccccttataaaaccatcagatctggtgagaactcactcactatcatgagaacagcatgggggaaccacccccaagatccaatcacctccctccttgtcactccctagacatgtgtggattgcaattcaaaatgagatttgggtagagacacagagccaaaccatatcattctgcccctggcctctcccaaatttcatgtcctcacattgcaaaacacaaatcatgcctttccaacagtcccccaaagccttaattcatttcagtattaacccaaaagtccaaagtccagtctcatctgagacaatgcaagtcccttctgcctatgagcctgtaaaatcaaaagcaagttagttccttccaagatacaatgtggatacaggcgttggataaatgttgccatttcaaatgggagaaattggccaaaacaggggctacaagccccatgcaaatccaaaatcccacaggggcagtcattaaatcttgaagctccaaaatgatctcctttgacttcatgtttcacatccaggtgatattattgcaagaggtgggctcccacagtcttgggcagctctacccctgtggctttgcagggtacagcccctgctcccaccctggctgctttcacggctgccgttgagggtctgcagcttttccaggcacacacacagtgcaggctgtcagtggatctgtcattctggggtctggagaatggtggtcctcttctcacagctccactatgcagtgccccagtgggggactctgtgtggggactccaaccccacatttcccttctgcactgtcctagcagaggttctccatgagggctccactcctgcagcacacaagtgcctggacatccaggcatttccacacatcctctgaaatccaggcagaagtttccaaacctcagttcctgtcttctgcacagccacaggacaaacaccacatggaagctgccaaggcttgggacttgcaccctctgaagcaatggcccaagctgtaccttcaccccttttagccacagctagagtgactgggacaaaaggcaccaagaggctacatacagcaggggggatcctgggcacagcccatgaaaccatttttccctcctaggcctctgggcctgtgatgggaggggccactgtgaaggtctctgacataccctggagacattttccacattctgttgatattaacactggactcctggttacttatgccaatttctgcatccagcttgaatttctccccagaaaatgggtttttcttctctaccacatcatcaggctgcaaattttccaaacttttatgctctgcttcccttttaaacataagttccaatttcagattatctctctcaagttcaaagttccacagatctctaggacaggggcaaaatgctgccagtctctttgctaaagcacagcaagagttacctttgctctagctcccaataaattcttcatcttcatgtgagaccacctcagcctatacttcactgcccatatcactatcagcattttgtcaaaaccattcaacaagtttctaggaagtttcaaatctttccacatcttcctgtcttcttcggagccctccaaactattccaacctctgcccattacccagttccaaagttgtttccacatttttgggtgtctttatagcagtacccccctctttgcggtaccaatttactgtattagtctgttttcatactgctgtgaagaaatacttgagactgggtaatttataaaggatagaggtttaattgactcacagttctgcatggctgaggaggcctcaggaaactttacagtcatggaggaaggcaaagggaaagtgaggaccttttttacatggtggcaggagagagaagagtgaggagcaaagtgggaagagccctttataaaaccatcagaccttgtgagaactcacttattatcatgagaatagcatgaaggaaactgcctccatgatctaatcacctcctaccagctccctcccatgacacatggggattatgcagattacgattcaagatgagatttgggtggggacacagccaaaccatatcaaacatcatggtaagttgtattatagtatgtccttggaaaaataagtttccttccctctgcctgccataggcagagactagagagaagaatgggactttgtcagtgtacctcattaggacttttcaggggtcagttcaattcaaagtctctgctgaagatctgtgcgtgtgcatatgcctctgtgtgtgcatgtgtgtatgtatatacatattttaaaacctgaaatgggtgtcatggaatagaaggggagtgagagggagagactgagtaatacaatctagtggccaaaggattcttacagactaaatgtccggtattcagttttgtgcttttaggatttttgtaatgtaaagcctccctgtctccctagcccatgaataaagtcttctgtatacacagaagtcacaagtgaaggggcagtttgtttatttttaggtttttgtattccttaattattgttgcatgaataacacacatttgttttctcctaatttttgtggcttaggaatctaagcatggctcagctgtgtcttctgtatcacctgtagtcacaaggctgcaatgagggtgtcagctagacctggggtctcatctgaggatttgtgggaaggatctgcttctcagctcatttgcatggattttgacagcattcagttccttaaggtgtgttggactgagggtctcggttccttgctggctgttgacaggagaccaccctaagttccttactattaatacatggacctccagccagtgagagagagtctgctattaataacaagatgacaatcactatcttttgtattgattaggggagtgacatccctcaatgttgccgtattctgttggttactcatgagaagaggattgtacatgactaggaatactgggaggtggagatctttgggggccatcttagaggcttgctatcagagctttcagtggaaatcagcataaggagttgaggtctatgtttgtaaaagtaagggatagtcacaagacacatagcagagaacaagaagtcaatgagggcagaaagttggaggtaacagtatccataggataatcaccattctcgccttattgtctagggatttcagacatcctgaatgggtactaaattttccacaggatgtggagttgtggtgcaagcagtggtaactggagcataaagagcagcatgattccagttgccatctgggttataataataatagaactatgaagaaaatgccaagggcatcacacacaggtagagtctattaattgcctagcaaagctgggaagacgtcactagggggtggcatgtctaggtcttcccgtgtgagcagcagaaggaaggtaccttccagagcaaaggagtttctagtagtgcagtggttttagtaaacctggagaaagttgatgaggcttgagtgtgtgaaacatgggagataattgtagcggataaactgacaaagcatttggggacacgatatttctgaaaatttctaatttctttttttttttttttgagacagagtctcactctgtcacccaggctggagtgcagtggcgtgatcttggctcactgcaagctctgcctcctgggttcatgccattctcctgcctcagcctcccaagtagctgggactacaggccctgccaccatgcctggctaattttttgtatttttagtagagacggggtttcaccgtgttagccaggatggtcttgatctcctgacttcgtgatccatctgccttggcctcctaaagtgctgggattacaggggtgagccaccgtgcccagccgaaaatatctaatttctaaaaaatcttgcgggtattgatgaaccaattggtataaccagatttttaaatatggtccttctggcttcagtgtggtgggtagtcacaggggcgtggtggtgagtagaaaccatgtgaggaggtgatgatagtaacaggcgagtgaggatataaacatactgagcttcggtcgccactcacttgctgtgccttgactgctctttgtcacactttgcccagtttctgtctccttcctccttagtagtcaaagtttgaaaatttcagaggttagagttcctccgaaaaaagttatttgtcttggcaatagcttcttaattatcttcttagaatcaggggggaaatcagccttcaaagctattttaaggattaattaacaattctgaaaggctccagaagcttaaaagccttatctagactttgcagtgttcagtaataatcaaagtgataatcagagcacagcaggactcagtggggtgtgcaaatccattcatgtcttgcattgcctgtgggctgtgtggtctgccatgtctccataagtgagtgagtcagggtaaggagaggccctgctgctaaagtggaaaagaatcaatgcctacaactgacaatacaagctgaaaaaagcttgtttaaagttgatcttaagatatggcactgaagcacaagtaaccaaagaaaaaaatgaataatttggagctcatcaaaattaaaaacttctgtgcttcaaaggttactatcaagaaagtaagaagaagaccaggcatggtggctcacacctgtaatcccagcattttgggaggccaaggcaggccgatcacttgaggtcaggagttccagaccagcctggccaacatggtgaaaccctgtctctactaaaaatacaaaaattagccaagtgtggtggcatgtgcctatagtcccagctactcgggaggctgagacatgagaatcccttgaacctgggaggcagcggttacggtgagctgagatcgtgccactgcattgcagcttgggtgacagagcaaggctctgtcttaaaacaaaaaagaagacaacccacagactgggaggaaatatttgcaaatcttatatctgataagggacttgtgtctaggatatataaagaacttttagactcagtagaaaagacgtttcaaaaataggcaatggataggaatagacatttgtccaaagaagacataccagtggccaataatcacataaaaaaaagtgctccgtatcattagtcaccaggaggaaatgcaattcaaaaccacaatgacatgccactttacacccactaggatggctataataaaaaagacagataatttttggcaagaatatggggaaattggaatcctcatacactgctggtaggaatgtaaaatggtgcaactaccatggaaaagtttggcagtttctgaaaaggttaagtatagagttatcttatgacccagcaagtccactactaggtacatatgcaagataaatgaaggcatgtgtccacacaaaagcctatacaagaatgttttttgcagcattattcgtaatagacaaaaaaggaaacaacccaaatggtcatcagttgatgagtggataagtaaaatatggtctgaagaaaaaataaacaatttttctcctctactgtcatacagtcactcaacacaatactattttttttttttttttttttttgagacggagttttgctttgtcgcccaggctggagtgcagtggcgcgatctcggctcactgcaagctccgcctcccgggttcacgccattctcctgcctcagcctcccgtgtagctgggactacaggcgcgcgccaccacgcccggctaatttttgtatttttagtagagacggggtttcaccgtgttagccaggatggtctcgatctcctgacctcgtgatccgcccgtctcggcctcccaaagtgctgggattacaggcgtgagccaccgcgcccggccaacacaatacttcttaagtgtagagggttttttccacacaccaaacaatcctccagcaggtgcaaactgggtatcctataattttactcaattctgacactagctacttgaagacaggatcagatcccacatgttgagggctcagtcagcacctctcccccagtttcagatgccaatcgcaagtaatagattgttacctatacttctaactgagggattcccatgaccctcattttgggttcagttaatttgctggagcagggccaggtgtgatggctcatgcctgtaatcccagcacttttgggagggtgaggcaggaggattgcttgagcccaggagttggagacaggcctgggcaacatagtgagactctatctctacaaaaaattgaaaaattagctgagcatggtagcatgtgcctgtagtgccacctagtctggaggttcaggtgggaggatctcttgagctcaggaggtcgaggctgcagtgagctgtgatcacaccactgcactctagcctgggtggcagagcaagaccttgtttcaaaaaaaaaaaaaaaaaaaattcctagagcagatcacagaacccagggaaacacttacatttactggttaattataaagaatattttaaggatacaatcgaacagctagttggatgggtggggaacatggggcttccatgccctctccaggcgtgtcaccctctaggcacaaactcagcaatccacaagctctccaaaccctgccctttggttttttatggagcttcattaagtaggtatgattgactacatcactgtccattagtgatcaactcaacttacagctcccgctcccttcccagaggttgagggtgaggttgaaagttacaggcctctagacatgtcctggtctttcctgaccagcccccttcttgaagctacctaggggttctcagccatcagatattcacttttgaatatcttttttatattcaaaactatagttccagagttctagagattccaagggctttaggaactatgtgccaggaattagaggcagagacaaaatatatgtctcttattatatctcactatcatatatgatatttcttttttttttagacagagtcttgctatgtcaccgaggctggagtgcagtggcgtgatctcggctcactgcaacctccacctcccgggttcaagcgattctcctgcctcagcctcccaagtagctgagactacaggtgcctgccaccacgcccagccaatttttttttgtatttttagtagagatggggttttactatgttggccagggtagtcttgaattccagaccttgggatccacctgcctcagccccccaaagtgctggaattacaggcgtgagccaccgctcctggcccacatatggtatttctatacaatagaatattatttggcaataacaaggaatgaagtacagagggtccttgacttaagatggtttaactttaagatgatgtgaacagccaggtgtggtggctcatgcatgtaatcccagcactgtggaaggccgaggcgggcggatcacctgaggtcaggagttcaagaccagcctggccaacgtggcaaaaccctgtctctacttagaatacgaaaattagtcaggaatggtgtgcctgtagtcccagctacttaggctgtggcatgagaattgctttgaacccgggaggtggaggttacagtgagccgagatcacgccactgtactccagcctaggcgacagagtgagactctgtctcaaaaaacaaaaagagataatgtgaataatctgattttcacttttagtacagtattcaatgaattacatgagacattcaatactttattataaaataggcttcgtgttaaaatgattttgcccacctgtaggctaacatatgtattctgagcacacttaaggtaggctagactaagctatgatgttcagtaggctggatgtgttaaatgcaatttcaatttatggtattttcaatgggatgtaaccccgccataagcggaggagcagctgtactgatgatgtgctacaatatgtgtgaaccttgaaaatattatgctaacactatgtctgaaagaagccagatacaagagggcttcatattatgaaaaactacatattatatgtactttaatgctacataaactacaaaaactacatattttatgttaccatttataggaaaagtccagtataggcacatttagagagacagaacggttagtgattgccaaggtcgggggagtggagggattggggagtgactggtaaagggaacagagttgtttagtttgctgtggctgccatgacaaattaccatagatgggtggcttaaacaacagaaagttacttttcaaagttctggaggctgaaagtccatgatactggtaccagcatgtttgggttcttgttgaaagccctctttcagtttgcagacaactgtcttcttcttgtactttcacatcctcacatggctgagagcagagagagaggaagcaagccctctcctgtctcttcttagaaggacgctaaccccatcaggagggcttcaccctcatgatctgatcacctcctgagcgctccatctccaaatgccatcacactggagattagggcttaacatatgtattttgtggggacatattcagtccataccaagtatttctctttggggtaattaaaataatctaaaactggttgtggtgatagttgcagcacaactctgaatatactaaactgttgattatgcactttaaatgggtgaattgaatggtatgtgaattatatttcaataatactgttcaaaaaaaaagttgatagtaaaaagccaaagggaaagctgggccgctgggtagggatggggggcggtcaaggaaaaggacctccctgggtaaatttcttcaccagtcacctgtctctccattaggtcattgtatgtggtttttgagggtttttttctgtggttggtggtggtgttttagaaaaagtggatgtgggctgggcccagcggctcacatctgtaatcccagcacttgggaggccgaggtgcgcagatcacttaagctcaggggttcaagaccagcctgggcaacatggtgaaaccttgtgtcaataaaaaaaattagctggatgtggtgacgtgcacctgtagtcccagctacctggggacctgaggcagaaggatcacttgaacccggtagatcgagatcgaggctgcagtgagccaagattgtgccactgcactccagcctgggtgacaaagtgagaccctgtctcaaaacaaacaaacaaacaagcagaaaaaccccacaagtggatatgcctgcattaaaaaaaaattttttttagagacagagtcttgctctgtcacacaggccggagtgcaatggcacaatcatggctcactgcagcctcaagcttcaggggttaagtgatcctcctacctcagcttcccaaagagctgggattgcaggtgtgagccgctgcactggtcttgcattttcctttcctctaccaaacctggctccatttgcttgttaaaaaagcagtgagcattagtggaatgttaatggtctgaacgactttaactttccatctggctgttactctccaggaagtctcttttcatttgattgcaactgattagaggttcttgttcatgttgcatttgatgtggctcatttagagtaaatctagtgggtgattttctctcctcttatgtccagcattccaaagagctctcttttagaggttgtgtccgcttcatcaatagcagatgatcacatttctgaccagccagtgtgccaaaaggatggaaggcaaagtgagggctgaattgtgtgtgggagaacccggaaactttctttcctcgtctttacgtgacaggcagcgggcccagcacactatgtcactttggaaagtcatctgtccagggcagctgtgataatggtatttcacaaaaaacctggggctttcacccaacatgccaaatgccagcttggccaagatacatccactcagcagactgacccatgctgggattctgcagaccagattaaaacatttgggtgtcccatctccatactgtggtctggttggttgagatgcagttgccttgcagacaagtcgacacatttggccctcagtagaagttcctcactgtaggttaatgacagtcaccagtcaaaccaacatggtcttaacttgaacgctctaaaaggaataaaatggtttcttttattggtttatcaattcatagcctaaaagaggaagttagcttgtcgcctgggcacctgtgtaagcccttgctgctccatgtggaagattcatgctttagaacacagcctttctttctttctgtagattcggatattatagggagacagaatctagggctgtggctggtgacctacttccttcttatggtgaagaaggtcagggagagagagaaaatgaggaagggagaagaaaaaaaggaaagaaggaaagagagagagtgagcaagagagccacagaaaaataatcattataatgaatgagaagaaataaagggatctgaaaaaagaatgagaaggagaaatacggttgtgaaacgagagggaaagagaatgcaggccgggtgcagtggctcacgcctgtaatcccagctctttgggaggctgaggcgggcacatcacttgaggtcaggagttccaacatggcaaaaccccatctctactgaaaataaaaaaattagccagtactggtggcatgcacctgtaatcccagctacctgggtggctggggcaagagaattgcttgaacctgggaggtggaggttgcagtgagccgagattgtgccactgtactccagcctgggcaacagagtgagactcaaaacaaaaaaaagtttaaaaaaaaaaaagagagaatgcaaatgggggagagaatggtatcaaggtatgaacaggaaaacaagttatgatgggtaaagatatagggagtgctgaaaaacatacaaggctaccgcttatgaattcttccttctttatcctagaaattgcaattgattgttaccaatggcctggagcttgcatatttctcttaaaaacctagctcatgccctctcttgtgcacaccatacagtcacctgagagtattccagtgctttctttggttcttctgcctccatctgctctcttctttcttttaccctccccaacagttggtccctaaaatagtagtactttagatctagaagcaacctcagagaagggctaagatttggctctttcactttacagctgaagaaaaagaaatccagcaaaattaaatgatttgcccaaggtcctataaccagtggactgcaaggctggactagagggcagagtttccatcccatgggtgcaggccaggtcctgagggacacgcttctctctgtagagagctgtctctcctgctcacatcctgggtaaatccttattggcaaagaagaaggtgggagagaaggtggccaacaaagtgctagctctgccaacttctctcatcgtcaggagacaagtgttgcaggtactttttattctctcccttttagtgtggggatgaagtggaggccagttggtttcctattggacagattctctttctcccttggattctgcctggccgtctgctgatggccccttctggatgtaacacatgttatctggaatagcgcaggtggggatgggtgaagagcattcagatagaagtttctgatggtagtgggcagcagggtggaatctcactttaacccacgggttctcagctggggtgattttgccccccagggaacttttggtaatgtctagaggcattttttgttgttacatctagggggtgctagtgagtagtacatctagtgagtagagaccagggatgctgtcagacattctccaatgcacagacagcccaccataacaaagagtcatctggtccacgatgtcagcagtgttacccaactgaacttgagtcctctcacccagcatgcacaaaaatccaaacactgatactaggatttgcagggagagaaagttaggcgtttgtggcagggtgccaaacagagaattgagcagcgaatgcttaagacctgaactctccaatagcttacaagcaagagatgttttgttttgttttgttttgtttttgaaacagggtcttgccttgtcacccaggctggagtggagtggctcaatctcagctcactgcaacctccacttcccaggttcaagcaattcacctgcctcagactcctgagtagctgagattacaggtgcctgccaccatgcccagctaatttttgtatttttagtagagatagggttttaatttactgtgttggtcacactggtctcaaactcctgacctcaagtgatcagacttccttggcctctcaaagtgctgggattacaggcgtgagccaccgtgcctggctacaactgaggggttttagttttaaaggcaggggttcatttcaagaaagcagaagttacaagcataatcgtaaatcaatacatgggtattatacactggtttggcccaaaaagatgggatatcttgaagtgaaggttacaggtcgtatgtggattcaaagattttttgatttgcaattggttaaggaagtaagaattcatctgaaaacttggggtcagcaggaaggaatgtcagggtttggcctgtgggcataactctctctaggcccctcaggaagaaattgacaacaaagaactgtcctcagggttcagtcttcatttcccccttatttgaggtctgtgtgacagcggttgacattttccatctggtaagggtttgggtttctgaaaaacgactcagggacatatgtcaagatgttatttgtagtttctatagggaaccaagcatctcgtgagtctaatgtacttgggtgactattgttacgctatttttaccttcttgcttagcaggttatttattcatttccttagttgctggctgcatggctagctaggtacccagaatttcccttgaagggactcaaatttttctttattttcaggctgagaggaagctggggaggcccctaagagggatccctactccatctcaataatgttgaggtgaagaaatttcactttgcctgaatctttttttagcagaagttcagtgctcatagcccaggatagtcagagaccctttttcctaactgggtggtagcgcctggagacagttcagtgcagatacttgagcttggacaagctgcctgtgatgataaccctgtgatgaatttcagggttaattaatttaaaaagtcaaggtttgctgaaaaccaggcagaattctcatctcctttcccctggctacagctcaacaggcagagcttacctgcttctcctctgcttagggcgacatcttaaaagggcagaaataaggactgtcttaggtgtggacttccagtggtcaaagtgtagtgctgaatagatagaactctgtgagtagtcacggtggagaattaaaccagaaaggaaatgagggtgagatggaaggaggagagacagattttataaaaggcaaaatagattctcctgtttgcagcagtcaagttgaaaccagccatagctgtaggcaagaaattatagagagattatcatcttagtgattgttctgtaaaattgctctaggccaaaggtgctgctttcacatttttgtaatttaacctctttttaccttcctgagccacagtgtgcatttgtgtttctaataagctgtctttttccaggaaggaattttggtgatgtttctgcctgtgctcacatatagaaaaggggtgctacgtgttctgggccattctagcctcccctgaatggacaatccatatgatataaaaatatactgttatataatcagagtttccaggtaaaataattgccacttccttcttaataactcatttttgttcttgtttatctaaaaagctaactaatgttgattttatttctatatgatcaatttatttttctcttattataatagaggttgttattaaagaaaaagttttccatccttccattgattctcagttactctaaggaccaagacttgttgatttccaatctgcctacattctagctcatttatcagaacttttcatcccctctatttcaagctatgttctaaaaaaatctttccaactgttcattacttgtgtttttttccttttcattgaatctgcaaatgtttaatgaatccctgctagctgcgagtcactgtatttagagctgcgggatgcacagctatgcctaaggtaccgtctgaactctcttggaactgtaggactgggaattccagtctgtgctcttggaggttgcgtgagggagagggagaagaggctacttataagactttgagggtgtactttgatccaccttttcattccttgtctttttttttttaaaatgtggtaaaatatccataacatttaccattttcaccatttttaagtatacattcaatggcactaagtacattagatgcagaatttttgctcctcctcccagctcctggtgaccactcttctactttctgtctccataaatttgactactgtaggtagctcatataaatggaatcacacaatatttgtccttttgtgactgcttatttcacgtagcatgatatcctcaaggttcatccatgtcatagcatgagacaggatttccttcctttttaaggctagataatattctgttgtatgtatataccacattgtctttagctactcctctgttgatggacacttggactgtttctaccttttggctactgtgactaacgctgctgtaaacactggtatattcccagtccttatctttaaaagcatatctgcatgtgaaagcactgaaaaaaaattggccaatgatgcctctccatatccatacatatgtacatgtatttatgtagttgtatgtgctaggcatagttatgtggtggcaatcattttttttctggcttgaaattgtaagccagaccaatatcatctcatgcccttgcttcacatcctcctttctctccactaaatctctctcctccgccccaccaaccccccaccgtctcttccccatcttctctttcccctgcttcaattcagtttagcacacttttattattgttaactttttgggtgcaaagtgctctggaaattttgaagaatgaaactggccttgggtttttcatggtctcttattggagacgagacccacggtagcagttgagtgagtcaggctgtggacctgccatggtggccaggctcatgaaaggatggcaaagatgagggaaaactcattccagccaaagaaaatgacccaaacaaagggtgtgggatggaaaatattggacatatttcattttaagtagtttttatttgtatgtggcctttaaatgtttttaattattaggatgtgcttgataaattccctacctgggagtaatagtgatttctccaccctgtgttgtagattttatatagaaaatttccctttaataatttgctttaaggccgggtgcggtggctcacgcctgtaatcccagcactttgggaggctgaggcaggcggatcacaaggtcaggagttccagaccagcctgaccaacatggtgaaaccccatctctactaaaatacaaaaatcagccatgcatggtgatgcgcacctgtaatcccagctactcaggagactgaggcaggagaattgcttgaacctgggaggcggagcttgcagtgagccaagattgctccactgcactccaacctgggcgacagagcaagactccgtctcagaaaaataaaataaaaataaaaataaataaaatctgttttaaaagaagtgcatttgtgtttgatgtaatcttagatattctccatgcttcagagaaagaagcacgttttgtttttagtatattttacatcagtaatttagttggatttttttcttgtaattctattggtttttgaaagattttgaaaaaaatttttaagagacagggtcttgctgagttgcccaggccagccttgaactccttgccccaagtgatcctctcaccttagtctcctgagtaactgggactataggaatgtgccatcaagcccggctcttttggtttttttaattaactgaaatctgatagaatcaaatgtttgtgaagcctggaaaagaagccctctcaatttaacagtttaacatttgaagaatgatgttgctcagttgagcaatttaatacttgaaaagtggtttctatcagtcaatttatttaacaaaagaaataagtgaatttgagacatcttgccacaaatatgttacagaaccccagtaggtgtacatatgtgtatgtatgtatgtatacgtgtatacacgcacatagtccctctcactttaagtgtgaaggtaaaaaaaactgggacaagcacggtggctcacacgtgtaatcccagcactttgggaggttgaggcaggaggatcatttgagaccaggagtttgagaccagcctggagatggcaagacctcatctctacaaaaaattttaaaaattatgcaggtatggtggtgtgtgcctgtagtcccagccattctggaggctaaggtgggaggatccctgagcccaggaatttgaggtggcagtgagctatgatcatgccactgcattccagcctagataacaaagtgagacctcattgttattggaaaggggtcacaatgcagaccccaagagaacgttcttggatcttgcacaagaaataattagaagcaaatccataaagtgaaagcaagtgtattaagaaagtaaaggaataaaagagtgtctgctccataggcgagcagtggcacgggctgctcagctgcttatacttattgttacttcttgattacatgctgaacaaggggtggattattcatgagttttctgggaaaggagtgggcaattcccttgaactgaaggttcctcctttttttagaccatacagggtaacttcctgacgttgccatggcatctgtaaactgttgtggtgctggtgggtgtgtcttttagcacgctaatgcattgtaattagcatataatgagctgtgagaccgagcagaggtcacgctcctctccatcttggttttggtgggttttagccggcttcgttactgcatgctgttttatcagcaaggtctttgtgacctgtatcttgtgccgacctcctgtcttaccctgtaactaagaatgccttaatctcctgggaatgcagcccagtaggtctcggccttattttacgcagctcctattcaagatggagttgctctggttcaaacgcgtctgaaaacatctctaaaaaaataaaaataaataaaattaacaacactttcagccagaagggggaacataagatataaagtgccatttttctttttttgatctttttttaaaatgattatctgctatcagcagatggccacacaatatgagcagtaaataatgtagtacatttagccggtgatttgggtcaatggtactgctagtctagctgttttgacttcaacctgacttccaagagtagcttgccaggtctgtaggactcactcagggatcctcagaggcccgaaaggtccagacctttgttaagcaggagcctgaagaagtagaggctccaagaaatatggtccaaccccctggcaagctacgacatataagaaccagacctggggagggagcagatggatgaaaggaaatggaattggaaagcgttcctagggttatgcgggaagaggagcaagatgctgtttgaggccttgctggtgaccctagattagttagtaggggaacctaaaaaatggcattatggctttctctccatgcttagtagcaattagtttggaagcttctgggacttagtcccttacagagtcatttacctggccctaggcactggggagatagagtattgtttcccagcatggcccattctggctctgcatttagggtgaggtttggctagaagtgtggcagactgaacagatcacatagtttgctctttctttcactccttcaactatttattgaacacctcctatgtgctgggcattattccaagtgctgggaatgatggcgtgagcaggacagaggctctgccctgtttgggtttgtgttctggtggaagtaacaggggaattagtgctcacgcagggtcttctgacttctatgtggatgttacttgcaatagtgctagacagaacactatcttttaatcacttgcaagatatctccctttttgatggttttggaagaagaaagagaagtcatacccaaagccgtttttttaattcagttttccttagaaaatcagaggacttctgaagatgtctccgacaatataatctccatgtcttttggtgatggactgatttgtccagatgcttctttcttcctgcagtttctgtgccccagtctcctatcaaaactcagaactttcatggtaatgattttagtaaactctcataaccagcaataatatcccttcagcccctggcctggccaactgcctaccttcatgtttcttcccactgtcatattatgattttaactggatttaataactcgtggcaaatttaaacagaaatttatagcccccattacagattgccctttaccttcttccagaaatgtttcccataagtactgagcttatgcaactaaaacatgatgatgacttctaaattcatagtttattaaacagattcttgagcttaagaacacagatctctctatacacaaaggattctgcagtgaaaagttccaaaggggaataaagtaatactttgggattagcaaatgagagagagaaaaatcatttgtctttcttagtgtctcacaatcattatattgagtgccaaaagtttgtggggagaaacaggaggaagagctttatccgaggttgaaatcctaatggcctaatggtgtttctcccatggagtgtggggagtctgctcccaaagggcccaaaaggctgaggtcaggcgatgcagtcgtggctgttttgccatggtctttgagggctttgccaagatgaccaacatggggatttgatcaaaatgcaattttgtttatgtggacattttctcactaggaaattgtcttgaaaataccaatttgtttcacagaaaatatcagccaggggttaatcaccatcatttggcaccggcagcatatgcatttagatgtgaacaaaggactacattgttagatgagttgtaaaggttttgctaatcttgaaaacttctttttaaatttaattagctggctggaaacggtggctcacgcctgtaatcctagcactttgggaggccgaggcgagtgtatcacctgaggtcaggagttcaaaccagcctggtcaacatggtgaaacctcgtctctactaaaaatacaaaaattagctgggcatggtggtgtgcgcctgtaattccagttactcaggaagctgaggcagtagaatcacttgaacccagggggcggaggttgcagtgagccgagaatgtgccactgcactccagcctgggtgacagagcaagactgtgtctcaaaaaaataaatgaataaataaaataaaataatacaaatagataaataaaattaattagctgaagaaagtatcagtgaaatgtgagggcatgaatagacatggcattatatgctttggttcaattattatctgagccagatttaatgatagatatttataaatttaaagattctagatgtcattgaattctttataaaatgtaggagttaaatactgtgagataggagaatcatgagccttcagattcagcagatgtataaaattctactttttaactagtatatgggttagacctcttggtatttttgatacttaaaaaaactcccagctaatttattcagaatagcccataaatgagacattcccatttagccgcaatgaaaaccgggggccatcacttatcagccagtacaatttttgtagaaatagaaggtggaattaaaattcttattctttttggatataaagtatactcattgccttaagaccattaagtgactttaatctttgtcaacaaattatgtcttcggtgtacacaagaatcatattgccataaacttcttctttttttctgcattctctattttaaattcttttgaaaaatagatgttattttccatatggtctgcttcagtgcttacttcatgccttcgactatgtttctgaggacttatgtagttttccctgagcttcgctctacttttccagggttggaaggaatacctgcatttctgtgatcagtgcttggtcccaccctactcccttgccttgcctgcctgccatgcacagagtgatcactcatgttttatcagatgttttcattaagacatagagcatataacaaggctcttatcctcatagaacaaataatgtagttggaaatgtaagataaaacctatatgaaaacaagaatattctagggctccatatgctgcttggcaagtgaacagagtaggagaagtgtaggcttcctccaaaagactggtcaggggaaggtttgggttcagcattgagggaatagtaagattctttttttttttttttgagacagagtcttgctctgtcgcccaggctggagtgcagtgtcgagatctcagctcactgcaacctccgcctcccgggttcaagcagttctctgcctcagcctcccgagtagctaggattacaggcacccaccaccacacctggctaatttttgtatttttagtagagatggggtttcaccatcttggccagtctggtcttgaactcctgacctcgtgatccatcggcctcggcctcccagagtgctgggattacaggtgtgagccaccgcgctcggcccaataataagattcttaagtagagacctcagaaaactatgtttcttgcttttttttaaatacaaggaaatgtttgcttatacagctaaaccattttctttaaatgctgtttaattatccctatattaactaagcaagcaatgacctcagttctgaattactgtattatctttcctctatatccgtccagagctctagccaatgggccagcagggaacatgaggaagtgtcacaccctcttggggtggggacatacagggctgggaagagagggggagatttcctgtccagagtgtcctgggctgggaggtggaaggcctgagggaactgtccctctccaccactaacgtgtcctagcaccagtcagggcctctgtccccatctatgtggccacagctggtcaccctcctcccaatctcacatgccatgagtctttgaaaatggctgagtttgcagcctgtcctgcttttattgccatgtcttttgtggaaagaggaaaaggaagtctcagcctctgctgttaatgagctgttatacgagccagcaggctgcagcagagtagtgggcctttcctcttctgtgcctccagctgctcacgcacacctatcctcttccatctcccagccagactcggtgctgaggtagaagcctgtgtcccaggtgctcatcatctctgctgaacacattcattatctgcaatcaagctgcattccagcttcttgccaaacccttgtctgtcagtagaagctgcattggggatatacagtctgaatttggctcattaggccaaaggcaagcagcagaacttggaaaaggccggggagggctgttgcgtggttctcagcaacttgtgcacactctggtgtgagagttaccaaaccccagaattacaagctcaccaaccccttactttacaagactttttgttctgcattcccattgcaggccagcatccttgatgctttgaagaatttaggaactttgccattggcaggatttatgaaagctacccccacctcctgcctccaaatacagcatggtagatcccagtaggttcctgacatgcatttctttgggggccctctgatcctccccagttttcctggccagatgaatgctgaagattccctgggccctgcgttttgtcacggcctccttgggggtggttcccttctgcatccagctgttgcagcctggctctgtgttcactgcaggctggggcccggccagctccctgctgtagcagttggtgagcagctccaaggatgaggggggagcagcagtgctgcaggcctgctgaggtcttggctcacggtggctcccctggctgacttttgaccaaatgggagaagaaaaatcttccctcctccctttaggtctcagagggaggccatgtctccctagagcatttctttctctccctcccatccttaggaaaagaagagtgtcatcctaaatgctgtgccttcacctgagaggggatatgtgcttttggtctaagcaagaagaatgagaaaaatttaggctcactgggagtcagaaggtcacattattcagttgttcatggaatacttcaaaatgtgtgagcatttatttcttgcctctcttttggctttgaaataccttaaaacaagtcagatacgtaagcatttgcagaagcagggtgtaagtagatttaagaacggcacgattcctctgtaatgtccacagacatatttctttagcaaagattgacatttgggccaaagcaggatttatttattcttgcaatcactcagtttgtaaattgacgggatatagattgccacagaagcacttccctgattcatattcaaaggagagtcttgttatattattaggtatagcaagtgtgttattgttaatatccacctttgagtacttgttcaaaggagataagcaggatattatattatttctaaccaaaccaagcttctcagacatcactcattgagaaggtaacaaaacagaagcccagggaagaataccctacataagtgcttgggaacctatgcccccgcaagaatcaactggcctgagccgcaagtgtggaaatggtctacatgcgccatcttgtggctaaggccatcaagaacgtttggagatagaaacacccaaataagagttctgctcaggttcactgcctttttgaagctgaagttcatgatagctgctttctagcatctagtgcacttcctgggattctcaattaatatttgtcaggtgaaactcttcgaaggaatctcatgtcatggcagagtatacttgttctatgttacactagaaggcatagccaagactgacatgtcctccagccatggtccaaggccgttgtgtccaaaataagacagaatactctaaacatggtctgagtagcctaaagtaacccagaaatattacttccaagactctggaaagtctgcttctagaggtcgacatcctcactgaaatctgcctttcaccacacttaacactttaaaaaaaattaatgtggtaaaaaacatgtaacataaaatttactggccaggcacagtggttcatgcctataattccagcactttggaagtctaggagagcagatcacctaaggtcaggagttcgagaccagcctggccaacatggtgaaatcctgtctctacttaaagtacaaaaattagccaggcatggtggcgcgcgcctgtaatcccagctacttgggaggcggaggcaagagcattgcttgaacctggaaagcagaggttgcagtgagccaagattctgccactgccctcctgcctgggagacagagcaagactctcaaaacaaaacaaaacataaaatttagcattttaaccatttttaagtgtacagtacagcagtgttaactatatgcagtccattatgcaacagatccctagaactttttcatcttgcaaaactgaaattctatatccattgaacaacaactacctgttaccacctcctcccggtgcttggcaaccacattatattttctacttctaagagttttactgctttggataccccatataagtggaatcatgcagtatcttttttgtgactggcttatttcacttaacgtcttcaagtttcatccacgttacatatggcaggatttcctccttttttaaggctgaataatattgtctgcatacgccacattttgtttatccattcatgcatagatggacatttaggttgcttccacatcttggctattgtgaataatgctgcggtgaacacagtgtgcacatttaacagttttattctcaatgatatgatggagtttaaaaatcttatggagaatttaatttattcttgaagttttaaactcaaatgcttgaggggtaaaagcttgagaaatgtctgttggttaatctgagctattcttgcggtttgtctaacaaggacaatcttaatccatatcaggtgcatcttaatacatacatacatatatatatatatatagagagagagagagagagagagagagagagagggagagggagggagagagagagagagaaagagagagagagagggagagagagagagagagaaagagagagagagacggagtttcgctctgttgcccaggctggagtgcaatggcacgatctcagctcaccgcaacctccgcctcccgggttcaagcgattctcctgcctcagtctcctgagtagttgggattacaggcatgtgccaccatgtctggctaattttgtatttttagtagagatggggtttctccatgttggccaagttggtcttgaactcccgacctcaggtgtactgcctgccttggcctcccaaagtgctgggattacaggcatgagccactgctcccggcctgcgaatatattttttaaagttgccttgaatcatttttggagcaagacagtgaataaatatacaaaagaaaatcatccgtttaagaaagtgcttgctttctgtgaagcatctggctattgcttgtaacatggtggagttgatgtcagacattatgtctctcactgaacgtcactttccttctcctgcccggaggtttgggattttgaagggcattggattataaagtgcacttgccaatttgtgattaggtctggaaatggggaatttgttcatttaacagcaggtgccacttgatcaaccactgccaatacttttgccgcggacttcccaggactccagctgcactcacggttcctttggtcaactgttctgcctcaagcctgctgtagatgccactgagaatagaaagttgaaaccagttgatcccagtgaagcagcaccacacagtacttattagagactaagaagccagggaacacttttcctcataattttttttccttaccccaggggttagtgtgtttaaaagagcactgtgggggtgctgttgtagaaagcagcaactctgtatcggatgccatcccctggtgttttaaaggcaggattacaaacatctagagaggaaaacaaaaaacaaaaacaaaacccacattctctaattcatatacagatcgttaagtgagaatggaatttatgcgatgcttttcatgatgggggattttctgcaagggaagccgcttgcccattttgtggtaacggcttgaaataaaggagaggccggagcaggcagcaaggttagcttgctcttgcaggataagcgttgtccttgctctcagttcccctgctgtgtggcctggtcccttccttgttatcacccttcaccagagccctgtgtgagggccctaatggagacttcaagagcttttagttcactaggtactgccacctgcatccactctctgcttttccttcccctgcaggtctcatgtgtccagcatagaagtatttttaagacctactttgcaagacgtgacttctgttgggattttaatttgaaatgaaatttaaatgtaccaaccctgggcattccgatcatttaatagacctgttgggagacaagtaatgaggagaaagccactccgagtccatcttgctcttaagcctgacaggttttatttggaagtgctgcctgttagtgagggagaaatgctcatttcttttttttcctgtgtaaggaactgttgaacttaattttcccccccaggtgttaggagacaggaattaaaaatagtatgtgacccagacacaccaagcaatacaaagttcttgcttctattatgttgctaactacctgcatcttgttaataaggaagggaaatgtctgttacctacaaactgaaggagtgaatgatttgattgagggaaatctgaaataccacgagaattagagaagtcctcacaaaagggcaaaagcttacatttttcatttttctctttatttcatgtgactttggccttaaagtcctccttcccactttctcacacccccactagctgaatgttgtgtcagattatttagaactttctaaataggggagaaaattttttttccccaagtttggctcctacgtcctttgagactataccgtctgtgcaggagaatttataaaaagatgggaggtttgggtgccggtttcctttttggaaatggtatttacccagatcacagtgaatctgcctctcgccttaaatggcagaggatgatagggtaggatcttcacgtgctagaaaggcagctggaagccatgtggagacctcaggagacctgaactacaagggtatctaagcaactgtggctgctggagttgaaggagggagtctgaagttgctcttctaggatgctggtcgcatcccctcagtcccctccctgttgttttcagtcacttcagagaggtggtggcagcccgtctacaccaccaagcggggatttaatggaagcatttcatttgcttcagcaagtcaaaagctgcccttttgtaaaaacgtgtaagcatgcctcttcatcctcattcccccaccccgcttctcctcattcattatttaaccagccgcctgggtcttctttctgctctcaagcatgccagtcccttccccacctggggaccttggccctgtctgttcctcttgtttggcatgctgttctccagggccttgcctggctgccactgcctcacttaggcctgaagcagaacctctgcaggggaacctgtctacaccaaactagttcatttttctacctttttatttatttatttttttttaagagacagggtcttgctctattgcccgggctggagtgcagtggcataatcatagctcactgcagccttgaactccagggcttaatcaattctcttgcctcagtctcctgagtagccaggactataggcgtataccaacatacccagctaatttttttgtttttgtagagatggggggtctcactatattgccctgggtggtcttgaagtaatcttcctgcctcaacctcccaaagtgctgagattataggcatgagccaccacaccctgcctaaaaaatctttttaagatggaaacatataaagtatattgagactttctttggagagagaaaatgcattaagcaaaaaagcatttagatttttttgaattccctattattaaaaataaagttgtattaaaatgtctcggtaatatatggttaaaccatagtctctatttgtgttttttaaggaatttgtaattaattgtggctttcttaaaatcatgaccgactgagttagatgtgccaccatcaatagttgatagctaaaattagtagcaagttaacaatttacttgttcatttccatgggctgctaagtagattttggtccaatgtattttaggggaaaaaatgttacactgagagtcaggagacatggctgttgccccttcctggctgtgtggcctgggtcagtcccttcccttctcaggccaatttcttatccgtggagcaaagataatggacggggggaaggggattccttccagctctccacagtctctggttctatattttgaagccatctgtggggcagttttaacagaaggtctgaaaaaatcagacttggtcatgtgcctcctattccttttttctctctctctatttgccacatcctttccccacactatagaaggatccagacactcgaatcatcaaggctctgttgctctccgctcttgcctgaatatgaaatgagggagtttgctgtcccctgatggagccttcgttcaagcaagccacgggctgtgaggctttcacccttggcttggcaagactgtcagcacggtgcttcccttttagagagcctaatgccaacagaaagggcagttttctagtaatggaggaaaatatcagttttcaaaaatatggataatttttaaaacctcctctttttcctgttgcctagttctctaccattaactccaggtctctcttcagggtctagcagagaccctgctgactgtcctctcactccttagaggccatcaggactctgaaatccgaggattaatggcggccgggaggggctgatgggcaggggagaaagcctaggattaaggatgaggagacctgagctccatctgtggatcctcctctgcctggtcccaggcctttgagcaagcccctggctgtgtctgacctgccttcctccctcaggttgtgctgcagaggggccacagtacagataacacagcacccgtcaacagtgggatattaggaggagaagaagtctccgctcacctgcgtgtgctctctcatcctcagagtcccatgtttccagtttctggaaggtcctcctaccagcctgaactacatgcattgtataacacgtaactgcaatttaaatcttgatttaccctcagagtcttattcggtcattaagtcatcatcataatatcttgtacctgttacttgttcagatttaataatttgtgaagtgtcctttgtggggtgaccaacagtcctggggactgaggggtttcccaggatgtacaatattaggtgctaaaactgaaagagttctgggcacatcaggatgatggtcattcttctcttggttcctctttttctttctggaaggaagtttctctgtaaattgttatttcttcatctgtaaaatatcttgctagtcccgtggcaataccgcctgtctaccccaagtaccctttctcctggactgcttgtatccacttccctgttactgctgtgttttctgcccagggctgaggctgtgcagtgaatgaatcatctttccccaaccttgcttgacatcagtatcaattttagaaggtgagagtgccacattttcttaatccagtctatcattgatggacatttgggttggttccaactggattaagaaaatgtggcacatatacaccatggaatactatgcagccataaaaaaggatgagttcacgtcctttgtagggacatggaggcagctggaaaccatcattctcagcaaactattgcagggacagaaaaccaaacactgcatgttctcactcataggtgggaattgaacaatgagaacacttggacacaggaaggggaacatcacacactggggcctgtcaagtggggagggatagcattaggagatatacctaatgtaaatgacaagttaatgggtgcagcacaccaacatggcacatgtatacatatgtaacaaacctgcacgttgtgcacatgtaccctagaacttaaagtataagaaaaataaataaatacataaaattcttttcaataacaatggaaacaaaattttctaaaattatgagatcatatctgtaaaaattaatgatgatcttttgtaaaatttcatctatacatagtgaattatactattaatattgatgaaaaaatgtaaacataaatctagtgtcttataagcatgaaaaatgtccaagtattttcaatgttgtgtttcttttgtcttaacaaacatgtcctacagtgttatttgactatgtgtgaattttattttttcaagactgtgttaatataatcctcaaactattttagaagcaactaaatagtgaataaagtgaagagtagaaatgtaatcagaaaaaaaaaagaaggtaagagtgctcacaattgcctcaaaaagaaaatgaggcttcttgaatttgcacttcagcattctctactcagtgcacctgtttgtgtaatttgctcttttcttgttatcatgatgcatgactgtattagtcagctcaggatgccacaacaaaatactgtagaccaggtggcttaaacaacaggaatttatttctcacagttctagaggctgggaagtccgagatcaaggtgttggtagatttggtgtctgccaaaggccaacgttctggttcatggatggtgccttcttctcactgtgtcctcaaatggtagaaggggcaaggggtcaatccagggcttctttcattaaggcactaatcactttcatgaggctctgccctcatgccctaagcacctcctaaaggccccacctcctaataccatcaccgtgggggttaggatttcagtctgtgaattttgaggggacacaaacattcagaccatagcagaccctcttcctaatctgcaggtggttgtcttcctgctgtgtcttcatgtggcagagagagcaaactctgggctctttcttttcttttcttttcttttcttttcttttctttttttttttttttgagatcgagtctcgctctgttgcccaggctagagtgcagtggcgtggtcttggctcactgcaacctctgcctcctgggttcaagcaattctcctgcctcaacctcctgagtagctgggattacaggtgcacaacaccacacctggctaattttttgtatttttagtagagacggggcttcaccatgttggccaggctggtctcgaactcctgacctcgtgatccgcccacctcagcctcccaaagtgctgggattacaggcgtgagccaccacgcctagccctgggctctttcttttcttataagaaccctaatctcatcatgggattagtgtccttataagaccctcatgacctcatctaaatctaattacctcccaaatacattcaaataccatcatattggaggttaggtctttaacatatgaatttgtcaggggacacagttcagtccataacatgcctttgtttccatgtcaccaacacactctatcttcttggccttaatccatttcttctggatggaatgtcttcccaagctacttggatttttcttcttcaaagctactcagaagtgccatcctttatgaagctttcttggacaaatactttctttagttttccatccctagcacttgtacacaacaaaaatagctggagcatttgtatatatttatcatgttttggctaatacccacttgtgtgagctccttgttgcttattagattttaaacactgtatgcaaggatctgctcctcctttccttgtgactctcccaaatctcactgcaagctgttcaccacgtggttataaatgaaatgtttttgaccaacagattgctcatttggtctcagccttggtcagattccaaggaaaacaaattaaaataatactcccttcttctttcgcagaaagacaaatttaaatgatatggttatatataatcattgtgataacatgattacatgattatatcattatctagaaatcatataggttaagtattgaaaggtgcagttatggagagatttgtccacaggctacagtagaactagttaggcttgtgctgttacacacgaaggtatcagtgggtgtcgggagaattcatgttgactcattcggggcacatgtaaatctgggccctgatgaagtacttgttcatgttccacttccatattttaggtattttaaattttgtagtgcagcttttcccagttgtgtcctttgctggtctggagatggcagtaatcatgaacaaatccacaaccctttggttcagtatccatcatctgaattcctggggttcccagtcctaaattgttgctttgagtttagaggggattgtaggtcatgccctctttgctcttccctcatcccctcatttgattaggtttctgctcaggcgatccttgtcttgtgattgcccttgtagaagggagcaggtgtcaacctctgacctaaaatttagttgtgatattgaggctgagggtgccacctgtgcactaagaaggtataaaaagatctgttactcacaaatcgaagctctctgaggagagctgggcaggctctcaggcaggttagaaaatggcttgagagcctcaagggcaactggctttggcttttttttttttttttttttttttgagacggagtctcactctgtcgcccgggctggagtgcagtggcaacaatctcgactcactgcaacctccgcctcccgggttcaagcgattctcctgcctcagcctcctgagtagctggaattataggcgtgcgccaccaagcccaggtaatttttgtatttttagtagagactgggtttcaccgtgtgggtcaggctggtctcgatctcctgacctcgtgatccgcccgcctcggctttggcttttatggtggtcagtggtttgggctggggccaaagcttgtgtggtttgagcttcccactggagccaaagaggtagcacatggctttcctgtcacttcccttggtgtgagtcaggaggggaggtggcaggggaggagcttgaaaactcagggaggctttcctgaccataacttgtgaatacctgattttatatttaaaatctatctaattacagtttcttctgctagattgtaagctctttgatttgttcagcatccaatttccacagctgagaactgccccaggcagtcagaggctctcagtagatatttgctgaaacaatacaaaggagatgaaggagtggccagaaaaatgggaggaggtgcctgaaagccaacagaagaaatgattctaagaaaggaggaatgtggctgggagccctggctcacgcctgtaatctcaacactttgggaggctgaggtgggcggaccacctgaggccaggagtttgagaccagcctggccaacgtggaccctgtctctactaaaaatacgaaaattagccgggcatggtggcatgtgcctgtaatcccagctactgaggaggctggggtagaagaatcgcttgaacccaggaggtggaggttgcagtgagctgagattacaccactgcactccagcctgggtgacagagtgaaactccgtatcaaaaaaaaaaaaagaaagataattgtgtcaaatgctgtcaatgggtcaagttagatgagcccaagattccccaatggacttaacaatatggataccattggtgacctcagtaagaccagttttggtctggagtagtgagcagaaaagccttattggaatgggttcaagagagaatggaaagattgaagttagagtcagttaatatggacaattcttctaggtactatagcagtaaaagggagtggaggccgagtgcagtggctcatggctgtaatctcagcactttgggaggccgaggcaggcagatcacctgaggtcaggagttcgagcccggccaacatggagaaacctcatctctgctaaaagtacaaaaattagctgcgcgtggtggcatgcacctgtattcccagctattcagggggctgaggcatgagaatcgcttgagcccaggaggcagaggttgcagtgagcagagatggcaccactgcactccagcctgggtgacagagcgagaacctgtctcaaagaagaagaagaaaaaaaaagggactagagaagtggagcccagagagggtttttattaatatgatagcatgtttatatgttgacgctgatggaaacagtccagtggaaaggaagacgctgaagattcaggagggaaggaggaaaattgctggggccctgtcctggagtaagatccagtgctcgagtggaagggccggtctgtaagggatttggtcagtttgttcacaacaacgagaaaaggcagagtgtgtgaacccactgcaggtaagaggggagatgtggttcacttctggtagctcctaggaagctctgtggacattcatgccaagtgacttgtggtggcctcggccctgcgcctccagaggtgtcggctgcatcagcacctgcagggggcgccctgtgcacgtcctgtcctcacatcctctttactaaacacggagatagatggagcaaccctcccgctgcaaacacagctcttcacagctctgacgtttttctactatactgcaaacacatctgtaatcacatttaaaaataaatccacacaagaaaaattcactgtttcttgtataacaagtgtaactgtgacttctgagacaacgctgaacattttctgaaatcttgtcaaaaaccacacgggggcactattcctttaaaatacacagtacggtatgtccaattttgatgactgaaacagtggcatctttgaagttcaatttcctgaagtttattttccttttagaagagaggctgttgtgtcacaataacaaaatattttctgtacttcatagatgatttgagatattccaaactcctagattttttatttaatctggcccctgggcaatcattcttttagtgttacagccacttcctttgcatttaaggcacaatgcatatttgtcttatttctgctctttcttatgcttacaatagaggctgtgagctagcagcgagtccagtttgtgctcatatctggaataaggttgtctgaagtagacagttcgagagaaaatgtcgttgtctttcttggttctcattccaccgttccccagctctcgcctctgaagcttgagctattacactttttatgacaggaaagaaaaaattaagtcttttgaacaatttcctgttttcaggaaagctatcaaacttaatttacacatatgaaagaagaggtttcagaggtagtgtaggattaggagaatagaatttgctcactgtctagcaatagataagctagtatttgcaaataatttagccaaaatgacaaattagttgaaagttaatatcgggcctcagatttctggttttgcaaaatttatttattatttttatttttttgagacagagtctcactctgttgcccaggctggagtacagtggtgtgatcttggctcactgcaacccctgcctcccaggttcaagtgattctcctgcctcagcctcccgagtacctgggattacaggcacgtgccaccacgcctggctaatttttgtatttttagtagagatggagtgtcgccatgttggccaggctggtcttgaactcctgacctcaggtgatctgcccaccttggcttcccaaagtgctaggattacaggcgtgagccaccacgcctagccctggttttgcaatatttaaatgtgtgatgcccaccatattgttgcaaacaatggcaagtccctaagggtgtagcagccttccattgtgtaatgatttgcttgtggggaaatatacaatgatgctgtggatccctatcatagttggtatgctatgttagtaagcaactattggggcaagtatttcttactgctttgtttcacaattcaaagccaaagtaatacataatcttttagtgccattttttagggctatccaataagaaaattacattgttgtctatgcaaaggctttatggaagctacttaaatataaaagaaacagacaaacagaaatgatcaagagtagccattgtcagctaaataattacaaaatcagtctgcatatattcattttttaaccactttgtattttgctcaatttaccttgaactggtaaacaattagttctttttttgagacagctctgttgcccaggcacagaggtacagtggcacgcattcatagctcactgcaaccttaaactcctgggcttagtttgtccttccatctcagcctcctgagtagctaggactacaggcacgtgacaccatacctggctaatttttatttgtattttttgtagagacaggtctcattatattacccaggctggtcttgacctcctggcctcaagcaatcctcctccttcagcctcccaaagtgttgggcttgcaggcgtgagccactgtgcccagccaacactggttcttaaactaaacatgttagggtgctcctgatattttaagcactcctaccacaatccattcattgtgcttcttcatcttaaatgtaaattgtcaccatggtaaacagatatgtgcctccaggacacagttctaattgatctgtgcttttagagtttcttgttttgactttgtgataacataaatgttttcaattcgttgagttgtacgcctaagttgttgttttcacacattgcttcggtggaggaaagctatttaaaatgtaagtccagaaattcatattaaatgctattactggctgggtgtggtggctcacgcctgtaatcccagcactttggtaggctgaggcaggcggatcacctgagatgaggagttggagaccagcctggccaacatggtgataccctgtctctacttaaaatacaaaaattagctgggcgtggtggcaggcgcctgtaatcccagctacttgggaggctgaggcaggagaattgcttgaacccgggaggcagaggttgcagtgagctgagatcgcgccattgcattccagccggggggacaagagtgagactttgtctgaccaaaaaaaaaagcacctctcacttttacggtggcctttatccagagcgcattctctttgtccaaacttatttcagttttatttttcttgggcctccttgatatggtttggctctgtgtccccacccaaatctcatctcgaattgtaatccccataatccccacgtgttgagggcagggcctggtgggaggtgattggatcatgggggcagtatcccccatgctgttctcctgatagtgagttatcacgagatctgatggttttataaggggctcttaccctttcacttgtttgtgctcgctcatgctctctctcttcccccttcctttctctcaccccctcatggaccccctgcacctgtcaccatgtaagacatgcctcttccccttctaccatgattgtaagtttcctgaggttttcccagtcttgcagaactgtgagtcaatgacacctcttttctttataaattacccagtcttgggtatgtctttgtagcagtgtgaaaacagactaatatgttccttaacttttccaagtgtaaatattgtcaaacaacctcaaaacaaccctaaattcctttaccctgatcatctgggttttaatgattacagttttgagtcctgtacatgatcaagtaggagagttgtggcaacaacattgtaggtgatgggggtgctgtggatcccagtagaatattatgctttctatgattctttgctttatgttatttcattaaggaaaaatcataccaagagtctaagtgtaggaggtaaacatgcatattgcatggaggactgaaacaaatgtagagattgcaggtcattaaaataaagcccatgctttcgtatatgcaaatcaagcatattttaaaaatagagatctgtgacatgctggtatctctttgaaaggaatattgcacttcttgtccaacttaaaaccagggaattttagaaaaattgtagcaatagggattattcttgattactgctgatgtttttatattgtgtttgactaaattagttgctttttgcaaagcactctgaagcacttcgcttttatatcattggagacatggattgtgtcctttgtgaaatagttattggtttcacattccctccaccacttctccttgatggctacgggctgagtatgattcatctctgtccttcactcatggtataatgaatggtgaacagtaaacaaacagggcttatttgtaggagtgaaattaagggtagcagtttgagtggtgtatatttggttgaagatgatgcagaggtggttgaaggggagagatgcaagtaataggcaataagccgattgccaaagagaggaggagagaggttctttgtttccccaaggcttacttgatgagctcatgtgcagtcactacaactgtgaaggaacttatctgtaaatgtgctttttaatacaactttggatgctggatcaaaatgacatgtttaaagattagacgcttatacttcttgaatgtatatagccttgactttaaatacctattctagtagagaaaatcttttcaagaagaagataaaacgtaaaaagccaatgttcagcaagataaaagaataagctgtatcctttcttaagagttagatgtgagagttgaattaagaaagaaaaaaagaaacatcaaattacttttagcttttcagttttcttcctttcatgtttaagattcagtgtctagttccttgtgagttgtctccaattctgtgaagtctaaatctaatggtatttttatccttgataaagcatcattgatttacatacgtatgagaaggggaaaaagagacattgttttattatttagaatgaatgtcaaatatttatgcaagttttgacagtattttcaaaagcaaaatattttcatatgaagagatttttcaccatgttttcaccaatagtctactgaaattttgaggcaaatcaaatgttaagagattatgggttgatgcaatgaatatgcctgtttttattgagtcaaactttggctgccagaagggtaacattactccttatttgaagttttaaccctttgagtatctgacctataatttttttaaatttgaaatcattctaaaatggattatgtgtttttctgcttgcttaaatataaggtagagaatatagtttgaaaaaaaattgttttaatgtttcagagttatgtatttatttattttgagatggagtcttgctgtgtcaccaggctggagcgcagtgatgcaatctctgctcactgcaacctccgcctcccgggttcaagcgattcccctgcctcggcctccagaatagctgggactacaggcgctcgccaccacacctggtgtggtgtattttagtagaaacggggtttcaccacgttggccaggatggtctcaatctcctgacctcgtgatccacccgcctcagcctcccaaagtgctgggattacaggtgtgaaccaccgcacccagctagagttatttttttcttcagtctctgtgctagtagtttccgagttattttaagcgttgattttggggataagccttgaatgcaggtggaggatattaaatatttacatttatgtaaagcacaatttaggtgcccgaggttaggtttttgcctgcttccagcagtgtttcagacaagggaatgccttgtgctttcctttccccggcttcctcctctgggtgtgctctcaattctaaccccgttaccagcattgccacctgttaattatcactgttggttatgctcttcaacttcagtctttccctgtcctctgagaacttctcctttggcttcatggcaccaaagtacatcccattctgaaatcaaaagaatagtaaacacaaaaacctactaactccccacaatttccttctcaaattactgctggatctttcttttctttctttatcatcagacatcacaaaagagcaatcttctacccatttcctttatttcctcacgtccaattcacttctcagacaggagcacctggcttcttgccccctcaccctatactgaaatgctctctgaagcatcatcacaacttcattgccaaattggaagcctttagagaatggcacttatccagttctcacccaggagccattaatgggagaaatcctggaagaataggggaagaatgccacccaccatcttgatcccatcaaaacccaaatggacatagaaatgcctgacagcctctttcaattaaactgtcatggccccagcatctcaaatcgatgctgttgggtacttcttagtctgcaaaggctctcctttccctaaagggtagagcccacaataaacaggactggaccaggatctctaggttccagagacattgatttgggaatgtacacataggctgcagggtgaaaatcctggaagtggaggcatagaaacacagtggtttttccttgagtttttaagagcttcatctgcttctgggccttctttgccctctcactctcattctgactgcctctcaatctaaagattcctcttcctcttttggcaaccataggtacagctgacttgcccatatacccactgcacagtcctcctgcctgtctcagttgtgtgagttgttagacatttccagaataattaataaaagaaagagaaaactaatttcattgaggagcacctctgtccctgagcctttgtataaatgtatatacacaattatgtgtatgcacacacacatttggtggtcatcttaactctgttcagtccacttgccatttaacctcttttaacctttatttccattttttggggagatatcatctttcttgttatcagaaaacacttttattcacttattttttccgttagtctttccagtcatccacctgttcatgtatccacttatccatccatccaccatccacccactcattcatccatctgcccacccacccatccacccatcattcaccaattaaacatgtactgagtagctatgatgtgccattactgccagatatagggagctcaaaatctgagaataatttcccttcattttgctatctcatctatcatacactcatatacatctaactttttgaattagtgctaactgaccatcaaacgtagaagtgagattgaaaagatgcttatatataagatcatattcctgaggcatagaggtaatcagaaatgatctgaaataacttctatcatccaattttactgaaggaaaagaagtgtggttgaaaattactatctgggtaactgtcctgaaaggcctgtgcacaagtcaaaaatactctcaggtgcaagcactaatgcaatactggtctttattcaacatgaaagcctggccactgtgccattgtgaatgcaacctacattttccaagcagcagaggacaaaacacactgtggtgtgtgaattcccctctcctggcccccagataccaatcactaaccaaacctttcccccttgacttcacccacccccatcaataaatttcttagcagctctcttgcctaagagagaatgacctcatactagcttttcagcactccagtttttgtagtatcaattatttaaatggaaagtttcctcaaatatttgatacctttgtctgtgtgtgtgtgtgtgtgtgtgtgtgtgtgtgttttgagacagggtcttactatgttgcccagggtggagtgcagtggtgcaattatgggtcactgcagcctggctctcccgggctcaaagtgattctcctatctcagcctccaaagtagctaggactacaggtgcttgccaccacgctcagataatttttgtattttctgtagcaatggggtttcactatgttgccagggctggtctcgaactcttgggctcaagtaactctcctgcctcagcttcccaaagtgctgggactgcaggcatgaaccactgtgcttgacctttttatttgtcttttgaaaatagtctgcaaaatctaataaatatttgactaccccttctttttgtttttggatggtgcaacatcaggaatattattattattatttttaccacgttatgagaaatagtcctttttttcaggtgtgtagagggctcagggtctcaaccctgatgctcccaggtcttagtgcttctttgaatgttggtatttttaaactttcttctcttgcctcctccctcccttttctacctgctttctttcattgctggctgtgtttctgcctgaggtccctaattcctccagcccatttcaccttttatttattttcgcttctaatcttctgtgattttgaaaactaaatagcttcttagaattgtgtgtaaaaaaggccgggcatggtggctcacacttgtaatcccagcactttgggaggctgaagcgggtggatcacctgaggtcaggagttcaagaccagcctggccaacatggtgaaaccccgtctctactaaaattacaaaaattagctgggcatggtggtgagcacctgtaatcccggctactctggaggctgaggcaggagaatcgcttgaacccaggaggcagaggttgcagtgagccaagaccatgccattgcactccagcctgggcaaaagagcgaaattccataaaaaaaaaagaaaagaattgtgtgtaaaattaaaagaaacagtctttgatcaaaggtctgaggaaattctaaggaatacagtatatgagagctttattgttttaggacttttattttctgcttttctctttttttttttgttgttgagacggagtctcactctgtcactcaggctggagtgcagtggcatgatctcggctcactgcaacctctgcctcctgggttcaagtgattcacctgcctcagcctcccaagtagctgggactacaggcacccgccaccatgcccggctgattttttgtatttttagtagagatggggtttcaccgtcttagccaggatggtctcgatctcctgacctcgggatccgcccgcctcagcctcccaaagtgctgggattacaggcgtgagccaccgcgcccggcccatctcatttttttaaggcttccttctgtttctcaggttttctctggatcagtgaagttgatttatctatctgcaatgactcattagctgagtttgaataaattgttatttttcaaatgtggtctgcagaactacttgtgtcagaaccactaggggtgctgttaaaatgcaggtgcacaggtcccttctcagatacgttgaatcagaatatctggatggaagacccaggaatatacattttcattaaacagccttagttatatgtatgccctagagcttgataactattggagtgggtgctgtgcctgtgttcttaatctgggctaagcttgtctcatgtttgtagttgtaaattaagatgaaatgcctggagaaggaagcctagtggttaaaagtgcaaactctaaagagcaacacctgggttaaacttgcagttctacctttaacaactaaatgatattgggcaatctatgaaaactctctttgcctcatttcccctgtgtataaaaggaagatgataataaagcctgattcatagggctgttgcattaatatagaaaaataatttaaaacagtaagcacacagaatggcagctattattactatgaatattatatttttgtatagtggctgtaccatatattttgtggcttatccgaagcacagttattgtggctctacataaagatatcctcctagccacatttgtgcctgagcgtgcaaacgtagacatgcatgcctggaacggtgagtgatgtatcgtgacctggcttcagataacatgactgtgggtcatggtcatgtcaacattgctcctatctcttggaaagcaaaatgtctaaattcaaaggaatatcactgtcatgagccttaattttttttaatagattggtttagcctcaaacgatgagactcatcaaaggattcaaaccagagtagtggctttgttttaagttgagacagtgagacagggttcttctgtgtgcatcaaattatacagtaattttgatggaatcccatacagaagtctactggtttctatggcaacctgaattcaaaataggatgttagaagcctcttcagagtagaaaaagcaagtttcattctttctgtagttatggaacatatagtttgtacaaagtattttctaaatggaacttttgtctttttactttcttgccattaataattttaacaattttgtagtactgcattcctacattctttctgtatctctgaatgagaatctcaagccaccctaaagtgcttgttttgctatgaatagctgatgtttcactttgtcgtttatagcagatgcactatatagtttttacttttctaatactatagcaattggtaataggagagaaaacctgttacagaattcctaggttagcaagtcagcctatttttagtggcaactacaaaaaaaagcttttgcgtaaatacctaatttttgtaaacgatgtatttttagcacatatctgtctggaagtattttaaaattggatctcgtaatcctgaagacaaagtctgttgcagatattgactaactgggtgggcagttccaagtataaaggctatgttgggctgtggtaacaaacacagtggaaagtctcagtggcttatgacaaccagagtttatttctcatttgttgcttctgcccgtgcaggtttactgtagttgctctctctgtcatcttcgctctgggacctgggctgacagaacagcccctatctggaacactgcccggcaaagggagaagagtgcaatgaagcaactactgactcttaaatcttccatccagaagtaacgtacatttttgctcacaattcattttccaaagcaaatcccatgtcttgcctgaatccattggttaggtaaatagaatccctctgcaaggcagtgtgtccccagttgtgctaagaagatgtgccatagggggacactagaacttacagatgatatatttttagttaaaaaaaattgttttggctgggcatggtggctcacgcctgtaatcccagcactttgggaagctgaggtgggtggatcatgaggtcaggagttcgagaccagcctggccaacatagtgaaaccccgtctctactaaaaatccaaaaattagctgggcatggtggcgggtgcctgtaatcccagctactcaggaggctgaggcaggagaatcacttgaaccctggaggcggaggttgcggtgagccgagatcgtgccactgcactccagcctgggcaacagagcgagactccatctcaaaaaaaaaaaattgttttagaggtgctggttgaggggagtaatggtggaatcacagaattttagagctggaggaaatggttcatgaaggttttggggcttacattcttttctttctagaattaggaagcttggtttcatggttttgacaaacgagcactttgtacaagagagcacattcagccttggtttacagcgccttgccttccatttgtttttgtccttttgattaacattcctttggataattaaattaagttaaacatttaaatttctaatagtggaacacagtgactgcataaatgttttcataattggttctctgaggcacaaaacttacaagaaatgaaaatggccaacaagacttttttttaagacagtttttccatattaatttaaaattatgattttttttttttttgagacagagttgcgctctgtcacccaggctggagtgcagtggtgcaatctcagctcactgcaacctccacttcctgggttcaagcgattctcctgcctcaccctcctgagtacctgggattataggtgcctgccaccacacccagctaatttttgtatttttagtagagatggggtttcaccatgttggccaggctggtctcgaactcctggcctcaagtgatgtgcccacctcagcctcccaaagtgctaggattacaggtgagagccaccatgtccagccaaaaattatgattctttagattctacgcaaattatctgtaagaagaaagctttagaaagaggcctgtactggaccaagaatgactcttttgtttttgtttttgagatggagtctcactttgtcacccaggctggagcgcagtggtgtgatcttggctcactacaatctctgtcccctgggtttgagtgattctcctgtctcagcctctggagtagctgggattacaggtgtccgtcaccatgcccagctgatttttgtaattttagtagagatggggtttcaccatgttggccaggctggtttcaaactcctgagctcaagtaagtgatcctcctgcctcggtctcccaaagtgctgggattgcaggcatgagccaccacatcaggctaagaaggactcttttggaccatggagtgttgctcactacatcccatcatgtaacagggtagtgtcattgttttcccagccagctaggaaaggtgtgacttgcttaaccagtgaactgacctgcagaacagatggaactgctaagtgaaagagccgtgttggctctggagacctagaagcatttcatccatatggagcaaagctgggaagtctgtaaaaggtatgctgggaagattacattcttccgaaggaaggcactatcccatcccataatgagtagtagcagagtgagcctccttaccagagttaccagggctttgcgattataacacaacagctctcacattcttgctgattccttggtaatggttgcatgaagaggttcaaagaggacctctctatatcctgggggaagggtcctttgcacggggcatgcttttgtgcaggatctcgtgctcaatttggccccctgcgtatcccctctgcagagcctctctgctatgtgaaccccaggattccatcatgggactcacaaggacacaggctaatgggctccagcaggtctaaaggcacctctcctgccctccctccgagcaacctagtactctctgtcatgggcatttctgtgtacctgctgcttgatgacattccctattcataatgatatccttgaagtgctgacaaagacttctgtatgtttggtgtgaattagacatgtttataatttgctgtcttgaaattgtgtaatcctcatatggcctgtgtatattctgtccaaatgagttatgtgataaaactctgtacagtcatgtaccacttagtgatggggagacgttctgaaaaacacatcattataggtgatttggtcattgtgtgaacatcacaaaatgcacttacacaaacctagatggtgtagcctaccacacacttaggctatgtggtatagcctgttgctcctagctacaaacctgtgcagcatgtgagctactggatattgtagccaattgtaacacaatagtaagtgtttgtatatttaaatgtatctacacatagaaaaggtacagtaaaagtatggtgtaagagattaaaatggtatacttgtctagggcacttattgcaaatggagcttgcaggattggaagttgctctgggtgagtcagtgagtgagtcctgagtgaacgtgaatgccagggacattactgtccactactgtagactttatccctgtacaattaggctacactacatttttaagaattttttcttcaataataaatcaaccttagcttagtataacttttttactttataaactttaacttctttttaaccttttgactgttttggaataacacttagcttaaaacacaaacacattatacttctgtgtaaatatattttctatttatccttatatgaacttttttcttttactttttacacttttttttttttttgagatggagtgtcgctctgtcttccaggctgcagcacagtgacacgatcttggctcactgcaacctccgcctcccgggttcaagcaattctccagcctcagcctcctgagtagctgggaatacaggtgcccgccgccacgcctggctaatttttgtatttttagtagaggctgcgtttcaccatgttggtcaggctggtctggaactcctgacttcaggcgctccacctgcctcggcctcccaaagtgctgggattacaggtgtgagccaccacgccttttaattaaaaactaacacataagcatgcacattagcctaggtctccacagagtgaggctcatcagtctcgctgtcttccatctccacatcttttcgcactggaaggatctcaggggcagtaacccacctggagctgtcatctgctatgacaatgatgccttcttctgggatacctccagaaggacctgcctgaggctgttttacagttaacttttttttttttttaataaatagaaggagtatactctaaaataaaaataaaaagcctagtttagtaaatatataaaccagaaacacagttgtttattgtcaatatgatgtactgtacataactatctgtgctatacttttatatgactgacagcacagtaggtttgtttacactagcatcgtcacaaaaacctgagtaatgcctcatgctatgaagttaggacagctacagagtcactaggtgataggaattcttcagccccattacagtcttatgggaccactgtcatatatttggtccatggttgaccaaaatgttgaaacatcattatgtggcgcatgactgtattaggatgttctgtccactgaacctgccctggagtcaccccaaaagtggcagcaggggaattcctgcaagggactgtctcagaccagaaatgggaccgtttgggattccaaagaaagaagcatcaaacaccagggtgatcagtcaaaaacatttattagggggaacttagggagctttagcatctttgtgacagacagtgagaaaagagatattctacccaggtatgttgctactgggacggcagggttctatgagggttcaaagaatttggctcagggtcaggggtaatttctgtgtttagcaacatagttgatttctccgtgcttcaagcaataacctcaacaactttatcagtgcctgggaatgttcaagaccccagcttgggttcgagcccagagtggaaaacatgcaggtgtccaggtcacagagtgatcaaggcaccgtgtttcttggtcaggacctcaaaggaagaaggtggagggacctgggggttactggagggttctataccagataactgagcctggagtttcagttagaagggagctgaaagtttttcttgaattctagatgacttcatctcaatgataggtgggctctcacctgtacagatgcagaccttgctacctcatgagacagtgactcttctggaataattgttctgtgttcttcattgtattgaacctacctctgtctccctctagttttgattttcttcgaccctatttctgttttctttgatcacccaagggtgtctgttcctttttctaccttgggagctcttaaatatgaggggagcagtcatatctccttgtaacatctcatctctgggccacgttttctccctcaccatctcttacaggaaacgttttagttttgcctccctgctggttgctgtccttgaggtgtgttcccacagatccccagcctccaccctatacagtgctgggctgggaacagatgcaggaccccagtgccaaacgccgccgggccatcattgaccctggttgggcagggtggccctcatggaaggggcccaggctttgccctcagatgcacctgggctcaagatccagctctgccacttgctagcagagtgacccatgcaccgtttatctgttcttcgaatctcaagtttattcatcttgtagagagggaacaataattcctccacttaaggggtgctatacacaataaggcaatgacatgtgtgaagtctctaatatcagtgtatggcaaataatcttttctcagtaaatatttgccttcccattgccctagtcattatatttttattagttcagtataatattatgtcagctttgtggttagccatatctcccctgtgccacaccgaacttgtaatgatctcaagtcccaaagccttccacgttaaacccgtctcttctatcctgccagtgtagcaagtattccatggagataataacacgcttgccatgtctagaacatagtacaaagaagaaatgctagctgtaaaactttattatgactacctgttttagtgcagattgattttaatggtgcttacttccctaacatctacattttgatatcaacaaagtgtgtcatattcaacgaagaagcttattggagaaatttagagagaaagaagtcacccctgttagaatgagcttagttaaaggttagcgcaacatctggaggaaggtagtggcctcccaataaaacttagctccctatggtccttgactttggttgtgactcagtattaatgttttcttttaagaacagatataacttaaatgttaatctcaagaaagtacatttcaacacagggaaggcagagaagagagtgctggaagatttctcactgttgctgtgtccccagccccagtttcttgacgcctttttagcaggtggctccctcctctagggaaaaaggtgaggagccagttagaaagcagaggcctgtccccgcagagggaggccaaactgacctcagattcagagacagccagctgtggaccgtctttcctcagagctacaaatgtgtcattttgattccatagggtcctggaggcacccgtgcattgcactgcaggaaattaatggcacaaaggttacttcctgcacgtttgctgctgagggtcatcttgatacctgcctcttctctgtctccccttctttaataaactttgtgtttcagagttgttttagatatacaaccaactgtgacagtggtacagagagttcctctataccctgcaccgagtttcccccgttagtaacatcttaccttactatggtacatttgtcaccatcggtaaactgatattgatatgttcttatgaaataagtccattctttgttcagatttccctaccttttacctaatgaccttttttctgtcccatgatttcatccaggataccacatgacagtctcacccaggataccacatgacattttgtcattatgtctccttaggctcctcttgactgtgacagttttctgtgccctatttttcaatctgctttgagctactttgcaagagatgctttttcctttctttctttctttcttttttttttttttttgagacagggtctcactgtttcccaggctagagtgcaggggcacaaacacagctaactgcagccttgaactcctgggctcaagcgatcctcccacctcagcctcccaaagtgctgggattaaaggtgtgagccaccatgcctggtcctttttcacatttttgataaaggcctgatggtggtggttaaaagcgctgttcattttcttcattaatcctccagtcagcaaacatttgcagagtacttaccagatgaggtcactgaacttaatgacagaaccaagggaagttgcctttccccgtgctagtgctgcccagcgcttcactggagatcttgttaaaatgcagattcttgttcagtagttccagggcagggcctgagattttgcattcccaacaagctccccgctgcacccaggctgcaagagatcatgcttggaggatcaagaccctagacttgggccagactccatattaagtggcagtgagagcaagggggccaggtgggagatgagagaagagttagataaattatatatcacagtttctgccttcaggaagttcgtggttctatcagaaaaataaagaagactggctgggcatggtggctcatgcttgtaatcccggcactttgggaggccaaggtgggtgaatcacttgaggccaggagttcgagaccagcctggccaacatatttagtagagacagtgaaaccctgtctctactaaaaatacaaaaattagctgagcgtggtggtgcatgactgtaattttagctacttgggaggctgaggcaagagaatcacttgaacccgggaggcggaggttgcactgagctgagattgcaccactgcactccagcctgggcgacagagtgagacttcatctcaagaaaaagaaagaagactgaacaaagcaagggagtaaaagtaaattgcaaaatggagatgaagacaatagacagtagacagttcacaccactgtgatggcttaaaaaaaaaaagaacaagtgttagaaaggatgtggagaaatgggaactcttatgcattgcttgtggaaatgtaaaatggtgcagccactgtggaaaagagtacaggagttcctcagaaaattatgtagaattggcagggcatggtggctggcacctaatcccagcactttgggaggctgaggcgggcagatcacttgaggccaggagttcaagaccagcctggccaacatggtgaaaccctgtctctactaaaaatacaaaaattagctgggcatggtggcaggtgcctgtaatcctagctgctcaggagactgaagcaggagaaccacttgaacccgggaggtggaggttgcagtaagccaagatggtgccactgcactccagcctgggtgacagagcgagactccgtctcaaaaaaaaaaaaaaattacgtagaattaccatatgatccagcaattccacttctgaatatatgcccataaggactgaaagcaggaatttgaacagatatctgtacaactgtgttcacagcagcattcttcacaatagccaaaatgtggaagtaacccaagtgtccatccacagacggatggctaaagaaaatgtaggatacacatacaacagaatactatccagccttgaaaatgagggaaaagtttgactcgtgctgcaacataggtgaaccttgaagacattacgctaagtgaaataagccaggccccaaaggaagaatgttttatggttccacttatatgaaatatctagagtagtcaacttcagagacacaaattctaatagtggttgccagggtttgggggaggacagaatggagagttagtgttaaatgggtacagagtttctttttgaaaagttgaaatggaagatggaaaagttctagagatggatagtgatgatggttgcacatcaatttgaatgtagttaatatcactgaactgcacacttacggatggttaaaatgctacattttgttatgcatattttcccatgatttgaaaaatggttaaaaaaaaggcacatacacaaaaatacaataggtggtagagttgtcagcggagagggataaaatggtaacagtaaggccttattgacagaccaggtgtgacttgccggcacaaagtacttattaactcatctaacttattgctcatctccagcaaccctctgaaacaggtacttattagccctgctttatagatgacacaactgagaaagggaagattacttaaggctctactagtcaatgggaagtttctaaggtagccgtgtaattgaaggtggaccttggaggagaggcaggattggggtggaaagaggataggaggtattctagatagataggagctggctaaggaaagatccagaaactggtgggaacttaaatattcagctgccatgacgatggttggtatgtagggttcgtatgaatgaaacgtgactaccagggcagataatgaaaggctttcaatcccagagtaagagatatagggccaggcgtggtgtctcatgcctgtaatcccagcactttgggaggccaaggcaggtggatcacttgaggtcaggagtttgaaacccgcctggccaccatgtcaaaaccctactaaaaagtacaaaaattagccagatgtggtggctcacacctgtagtcccagctacttgggaggctgaggcatgaatcgcttgaacccaggaggcggaggtttcagtgagccgagactgcatcactgcactccagcctggacaacagagtgagactccatctcaaagaaaaaaaaaaaaaaaagaaagaaaagaaaaaagagagatatggaacgggggcatcaaactcaaactcaagtgttttcagaggccagcaggtaacaaatgtgagacaagtggcttagtccaggtgacagggagtagtatggactgtggcaagctgaatagagcacatcccacctgagacattcagatctcaaacataaatcctgggcaatgtgggccactgatgggcttggatgacattgaacttctgatggtgaggttgctgtgccctttgaaggcatgcagagtggtgtcgagggcatatgcaagaccacatggtatatgaggcatatcttcctggctgtgtcaatagcactagaagattatgggtaaaaattgatgcactttcactaagtacttaaaaaatgatttttatggtatgacaaagacaggtggagtagaatactaatgatagcgaacattgttgaatgctgactatgtgccaggcaccgttctgagcattttgcatatattatctccttcagtcctccaaatagcccatgtacttggttccattgttatccctatttacaaataaggaaatggaggtgcagaaaggggaagtaacttgcccgaaatggttgtgacagaaatctgggacacagtggtggttgcacttgcacttagaattaactctgagtttcctgaaagctgtttctcatttattttgtcatggcactgtagtccaagagtaatttaagaaatgtttccatttttattgtagatttagaaatacatgtgcaggtttgttccaaggacgaggttgtgtggtgctgaggtttgtgtttctatggatcccttcacccagatcatgaacatagtacccaataggaagtttttccgcccccctcactccctccttttgaagtctccattgtctcttgttcccatctttatgtctgtgtgaccccaaattttagctctcacttataagtgagaacattcagttcttgattttccatttctgcattagttctcttaggatgacagcctcctgctgcatccacattgctgcaaagaacctgattttgttctttttatgactgcctagtattccctgatgtatatgtcccacgttttctttgtctgatccaccactgatgggcatgtaggttgagtccatgtctttgctactgtgaatagtactgcgatgaacatacacatgcatgtgtctttatggcagaaagattcattctcctttgagtagatacccagtaatggaactgctgggttgaatggtagttctatttttagttctttgcaaaatttccaaagtgctttccacaggggctgaactaatttgcattcccaccaacagtttataagcatttcttttttgccacgacctcaccagcatctgttattttttgactttttaataatagcaattctgactggtgtgagatggtgtctcattgtggttttgatttgcatccaagagtaatttaaatagggaccactagatgtcactacccagtgctccttaagaaagagaaacagacaagaaacgccgctgtggctctgccttgaagaaacagaaaaactgcttaaccactgatatttatggtcttcctattgaagaatgctgatgtgacctggttgccacagtgcctctgactcctcccctatccccattgtccagcccagctaagtggtgctgcgggagccctattctgctggtagattttgtaatttcaggaaaactagaagggactctgtcatttcataagtcaactccttcctgcatcagctgcccactccactgaaggcaggaggggcaggattgactgaaggaggttttggttgttagcatgtgtgtgtgtgtgtgtgtgtgtgtgtgtatgtatgtatgtaaagtaggggggacacgggggttgtttccagttttgaataactcaggacctgctcttgcacattggtctagtgctttcaactaagaccttccttaacatggggcttgcacagggcagaagtgtgaccaatatatgctaaattaagttgcacagaagggcaggaatggggcttctgcacagaacatcgaaaaggagaggaggatcttggaagggactaggtagtgcctgaacctctcagggcagtgggtaggtagaggagagtttgccaggggttcattcagagggaaataaaggaaggtgtatggtgccctcctcacaggtacccgacttacttattcaggatatagctatggaatgtacatgttcttcaggtacctacaaagatttgtcaaagttgagcaaatcaaccaggcacggtggctcatgcctatagtcccagcgcttttggagactgaggcaggaggatcacttgagcccaggagttcaagaccagcctgggtaacaacgagatcctgtcaccagacatggtggcatgtgcctgtggtccgagtacttgggaggcagaggtgagaggattgcttgaccccagaagtttaaggctgcagtgagccttaatggcaccattgcactccagcctgggtgacagagaccatgtttgtttggtttttttttaaagtaaggtttttttttttattaatttctctttaaaatattccttttcctccatcccagcatcctcaactaacttaaaaatcttccttctttactgtaaatatttcaagaattctgtatatctaaatatagtcaatacaatgatgaattacatttttatccagttaccttgaggctggaaaacgaagagaggtttctctagaacactgtgaaaggtaacccataccaaaatagagcagagaagggggaggagggaactgccgcagaaaaaccttaaagctttcactgaaatgtgtctcctttcttttggagaggaggtcaaaatataataagcgcatcaagagctgttttgaaaaatggggctgtgtaagttatgagaacagctgtagagattttttttttttttttagatggaatcttggtctgtcgcccaggctggagtgcagtggcacaatcttggctcactgcaacctccacctccctggttgaagcaattcccctgcctcagcctcccaagtagctgggattataggtgcatgccaccaggcccggctaattttttttgtatttttaatagagacagggtttcaccatattggccagactggtcttgaactcctgacctcaggcaatctgcctgcctcagcctcccaaagtgctgggattacaggtgtgaggcaccatgcccggccgagatatgtttttaaaatctggataataaagcaaatggtatagatgaatgtctttaaattacaggaagaaaatggtatcaggcaaaactttatattttccatgggccctggagatggaaattcatttgcttgggagtggaaagcatgctttgcatgatgttcattgatggaatgtattttaaaaatgcagaacctaattggggctctcaaattttctacccttattaattcaaatggagactttctgctaaactcaaaaatgcaaatactaagttatttcaaataggaatcctgctaacactagtacctctttattgcatgtaaccacagatgcttccttttgagtccttggtcatcactaacaccacatagaatggtatcaagctcattttgatgctgctgtatctatttggtgtgaatgataatagccatactgcacatttgaatcacactatcacatgtggttacattgaattcttacagcaactctgtgtggtataaggtacacattgttaaatatatttgatagatgatagaaccaagtctcagagaggtgaattaacttgaccaaggcaacaattagttagttggataagttgcatatttgatctcagaagaattcttattaaaatgaatagattccaataacattttgctttggggaagtatctgcaaaatcttccactgcagctatttaggccatggtcgctgtataacctcgacagtatttgctgtatatatgaacagagaaagacccacacagatacatctttgatttatatcagctccacatgatttggtattaaaaaaattgtcttcctaaaaaaatcatattcccaattcattgaatcaagaagtgccatcacatgtgtgtgtatatgtatgtgtgtgtgtgtttcaagtaagaggacgaaagaggacagaggaacaaaaaaagcctcttctctttaaaaatgttgctgtactgcaagtcagccactgctgaaactctgagatggcttttgttttaaaatctcctgggacttgcagatcgtggaggtgcggcattgctgttcatatccatgatcatgcctgaagcacacacggaaaggttgtgagcagtccctcttgtaggggtgtgtggcatgtgaagactttggtgtgctgtggatcactccttggagaaatgctcgttgttagcacagttaggtttttgctggcagaatggcagaagccagctttctaaaatgactacctctcccgcacctccctgctatttttgcattggcatcctcctgatgaggatagctcttgctgaccatttacacttatttacattctattccacagcccataagagccagctttcctaagctccttccctgacatcccagactcatgtaaacatcatcctccggaagcacttgttacccgtaaaactcattctctttttttttttttttctttcgagacagagttttgctcttgttgcccaggctgaagtgcagtggcatgatctcagctcactgcaacctccgcctcccagattcaagcgattctcctgcctcagcctcctgagtagttgggattatagccatgtgccaccatgtccggctaattttgtattttttttttttttttttttttttttttttagtagagatggggtttcaccatgttggtcaggctggtctcgaactcctgacctcaggtgatccacctgtcttggcctcctaaagtgctgggattacaggcatgcgccaccgtgcctggccgactcgttctttaactgatggacgctaccctgccagatggtggttttattcaggtacatacacatttcatctccctgcctttagtgtgaatttccagagggcagggcctgagtctcaggccccattcttgctgccctctccttccaccaccccttggcactcagcctttggccaggcccagtttgttgagaggcaagaggcaggaggctgtggttaaggccatgtgctctgatcccgacctcctaggtttgaatcctgactgctacttactgaccgtgacctttggtagctcagcctcttaatctgtaaaatggaaatcctaatggtacctgcctcgtagggttgttgaaaagattcggtgagatttgatgtgaaaactgcttagcatggtgtctggtatgcagtaggcatgataaaagccatacctattgttatgcttcaggaagaatctgctggaggtgggaggctggaggcccatgaggaggcctctggggcggtgacggtggaagagccacatctgcgctggctcaagagcccgcgcacttttctgcacatcctccgcccaggccatgagcatcagtcctcgctgcagtcttgtcccagcccaagaggtcaggggcgtgtgagtgctgggaggggagagtaggtacagagtgctgtcactgggagggaggatttggtggctaattggatatacgaaaagtaaatggggagttaaggattcctttcaggtttccagtttggacaactgggttgacatggatgctgttaactgagaaaggaaccaagagttggaacaggtttagaggggctggtaatgaatttagttacagacgtcttgggtttgcaggatccgggatgcatctagatggagccatccagttgtaatgacaacagagaacatatatggaatatcatgttccagtgtctgttccaagcccttcacaggtttgaatccacttattctcacaacaaccttatgaaggaggtacaattcttattcccattttacagatgagaagactagatgcagggtgctttagttacttgtgtaaggccacactgctaacaagagatggtgcagagattgggacccaggtagtctggtcccagatagcccccacattttgctgctactctacacagaccctccatctcgtttctgggaggataggtctggacatgtaggtgtggtgaagccttggcagggaggacatagctcgaaagcccctgaagagtgaggtgggtggtggaggaaagaaactcaatttgctgatgcaaatgagcatcattgttgaaaattcaggatcaataaaaggtatgactgggaggaaaggtcaagtcggagtatgatattcttgttaatatctctaagtaaaggctataggattgatgacacaatgctttgatacaatacttatgtgtccatttcagtcaacaaagtttgctcagatggctttcaaattcctttgattaacactcttgtgaggtaagtaggtgggaagtgttattactgagggtacacaggaagaaatgaatttgggaatagaatcctagccagactctccccgccaagagttttatttaacaaagcacacactgatagaaggtgtagattgcaaagtactagttatgtcctggagttgggttagtaattttcaattaactttttgggtggcatagccttggtacctaaacaaaatgaaatggctgctaatgatttatttttactctacaagctgccttaattataccaagaagaggattaacacattggctctcggctctggctgtgcgtcagaatcacccaaggggctttaagaaactgcattcttaggccccacctctgcaaatttccattgggtaaattgggttagaggtaaaggagtggactggggctgttgttgtgcattttaaaaataggtgctcctttgtcaagatgctggaatgacataagtatttatttccttttcatcccagaatctcactgaaatgattcccccaaagggtataagaagaaaaaaaaaaaaaccataacagggcgggcagacagaataaggtaccatcaactggaaagaaattctgaggattgtcccgaaggtaccagcagatgggactggggactggattttaaaagatagagcaaaaaacccagagggggcggacatgaactgtccaaggggagcaccgttctgggctggagctgggaagaaacaccacctgcgccatctagtggaggtcatgagtaggccatggagtgagtgattgattgtctggataattaattaaaagacaccctgttcctactgattccttatgccaagcagctgacagccgcatttgttctcaggctaaagctgcaagaactgttctccaaataaaattcaggctcagccccggggtgtgagtccctacattggcaccaaggtgacagagaagcagaaggtacttttgcatcttcgtgagggtgaagctcaccaagctccaggggaaagcttttcacactttggtggagaggtgggtcaccctcttgctcactgctcagacatccattgggagacctggctgcccaccgatgtccctattctcatagactagggtagacagccctcgaacgcaggggagaggctcactgtgaaaatagattttctggggggtgtgctgaatacagcattccaatgatgcagatgtgggatgaccagcctattattggctgtatgcattgctggtcctgctagatggacttagtgcccccgtggaggggagacagaatactgagaggaaggataataagcaccgtggatttctgtacaggccttatcatttccacatctttcatctgagcctcataacaatcttgtgaggcaaatggcacttatggtttcattttaccaataagacagctgaggttctgagaagttaaggaagttcagggacttgatcaagttcattcaggtaacatgtagcagagtaaggaaccaaaactgggttttgctacctcagatgatattctctttctacttatcgcatattttccagtttacataatttacttaatttcaactttttttttttttttttggagatggagttgcccaggctggattgcagtggcaccatctccactcaccacaacctacgcctcctgagttcaagcgattctcttgtctgagcctcctgagtagctgggactacaggtgtgcaacaccatgcccagctaatttttttgtatttttagtagagacaggggttcaccatgttggccaggctggtcttgaactcctgacctcaggcgatccccccaccttggcctcccaaagtgctgggattacagacatgagccaccatgcccagcctatttcaactttttgataaacattcatttctggaaggtagagtagacttcgggatctgtagataaatttgtgccagtgtaatagagtaatgaggctgaaaaacattgagaaatattctgaaatgatggctcccacgaaagtgaaaaagatagtatcatgtattaaaaagggattaatttaggaatttgactgtggttgggtttaggacatacttgtttcctgaggttgctgcaacaaagtactacaaagccggtggtgtaaaatagcacacatttattttctcacagttgtaggggtcagaagttggaaatcaaggtgtcagcagggttgccttccttggaaggctctgggggagaatttcgttccttgaccttccagcgtctggtggccgttagcattccgtgacttcttggctcatggttacatcactccaatctcagcattcatcttcatgtcaccttgtcctctgtgtcttctcccctttgtccccttcgtctctttttttttgagacagagtctcactctgtctcccaggctggagtgcagtggcgcgatctcagctcactgcaagctctgcctcctgggttcacgccattctcctgcctcagcctcctgagcagctgggactagaggcgcccgccaccacgcctgcctaattttttgtatttttagtagagacggggtttcaccgtgttggccaggatggtctcgatctcctgacctcgtgatccgcctgcctcagcctcccaaagtgctgggattacaggcgtgagccactgcgcctggccccctttgtctcttataaggacacttgccattggatttaggacccattcaagtaatccaggatgatctcattgcaacatccttaacttaaatttgcaaagaccctttttccaaatgaggtcacatttagaggttccagggatttgaatgcagatgtatcttttggtgtggggtcatcactcagctcactacagggtgtatttatttacttaactttttcatagtgaaatgaaaaaaccccttggcccttataccctgtgatgtatatttatacaaccattggaacacctcatccctagggactaggtttgtgttatttttttttcttaaacaccaacaggtaacagctgccagtttgaaagcaggtgcttctcttgagcctttcctgtgtctgtctgtgatgacatttctgtgactccatctctgcctccttttctttagtttcctgggcaagacactaggattttagaaactggtattcaaaagggaggaaatcaagtgacagaaaataagaaaaatattctgaggtttctgccttctttaatcatggaaaggaatggcaggtttactcagcccagattggaaagaaaggtaaaaaccttgggacaggaggggatattgggctatttatttttgagtcactcacattcttcagtttgaaaatggaaaaaactgaaagccagaaggattatgtaaggtcacttggcaagttgtgggctgacatagcattaagactaagagcttctgagttctctattcttttttttttttttttttaagagacagggtcttgctctgttgcccaggctggagtgcagcagcgtgatcacagctcactgcagccccgatgagttctctgttctgagcttctgaatcacagtgactcttgagggggtctcactctattaatctttggttgtctaagcagtatatgagggtcttgacactcacagccaaatgagcacacaggagaggttaagccttgactttgctgtgtttgatcttcattcaataaatgagtaaaagaaatgaatgctgtggttgtattcaacttgtttccaagctagccagtagtgagaagcctgtaagcaaatggatttttaaaatttcatactagtatctattacgggcaataccgttcttgaatccaagtgaattgtctgaaggattaccatgtctggtgctggtgtttgtagacttatataggaaaaataacaacaaacagaagccagcctttcttcttcataaggacttgctccgaccattcatctaaaagtagattttctctttgcagactttgaactgctttgaacttgtttgcaaggtcagccctccactagttcaggagaatgaaagctatttggagagctggagtaaatattgaagtaaaccagcccaaagagcagtttgccttgtctcaggagaagttgatagctttaccaggtactggtaggtagtttcccaacatagggcccaactgccaggcaatgttggtaggctctgcagacttctaaatgacagactttattttattttattttatttttgagacggagtctcgctttgtcacccaggctggggtgcagtggcgtgatctcggctcactgcaagctccaccttctgggttcacgccactctcctgcctcagcctcccgagtagctgggactacaggtgcccgccaccatgccaggctaattgtttttgcatttttagtagagacggggtttcactgtgttagccaggatggtacagactttaataaagcatgtctgttaagtgatattatgctttgaatcattttgtgtatgaacttacttccttatttttttggctaatgcctattaaatctaatgtattctgcttctttttgtgctaagcacatgactgaaaggctgtgagccataaatcttacactcaaaaaattcacatgatgttttctcattttaccttgtaatgactttggccttgtggtttattgttatggcctgggagtgtttttgaggtacatttttatttttgtcatataaagtacccaaaacgctcctggtgtgtgtctaagggatagccttgggcggggggagggggcagttactttggcatttatgcttgcaacctttttggcacttatatttgccaactgagtaggccagtaataatttggaatatgtcttgttgagcatatacttctgagagatgtaaaaaccaaagtttctgcaaatttatttaattccttgtttgatcagcatcaaactggacctcaagtttaaatttaatttctattttcacttgggaacaaaaattattgcaagaattgacaaggcagctagatatggtggctcacacttgtgatctcagtactttgggaggctgaggcagaaggatcacttgaggccaggagttcaagaccagcatgggcaagactctgtctctaaagaaaaaaagaaagaaagaaaagaaaaatgcatttgcaaggctaatagaaatcaggaggctaaaaggaaaacctggcctaaatgatgtatctcctagatgtaggtggggcaggcagtcatatttgcttaaggagcctatgaggcagcctgtagaaaagggacaggcgcctctaatcccagctccttgggaagctgaggcacgagaattgcttgaacccaggaggtggaggttgcagtgagccaagattgtaccactgcactccagcctgggcgacagagtgagactgtgcctcaaaaaaaaaaggggggacccttttggctgggaatggtggctcacgcctgtaatctcagcactttgggaggccaaggtgggcagatcacttgaggccaggagtttgagaccagcccggcaacatgctgaaaccccgtctctactaaaaatacaaaatgagctgggtgtggtggcacacgcctttaatcccagctacttgggaggctgaggcagaagaatcgctttgtaaagcatgatcatgccactgcactccagcctgggcgacagagtgagacagtgtctgaaaaaaaaagaaaagggaccctttttttctggattccagacaggaaaatttaatcctcggtggtgtttttttttaagaaacagagtctttctctcttacttaggctggagtgtagtgattccagcatagctcactgcagcctcaaactcctgggctaaagcaattctcctacctcagcctcccaagtagctgagactacaggcacacaccaccatactcagctaatttttaaattttttgtagagatagggtcttgccatgttatccaggctggtctcaaactcctgggctcaagcaatcctcctgccttgacctcccaaagtgctgggattacaggcatgagccactgtgcctggccactttttcaactttaaaagtggtccccggctgggcacagtggctcacgcctgtaatcccagcactttgggaggccgaggtgggcggatcacaaggtcaggagttcgagaccagcctgaccaacatggtgaaaccccgtctctactgaaaatacaaaaattagcccggcgtggtggcacacacctgtactcccagctactcgggaggctgaggcaggagaatcgcttgaacctgggaggcagaggttgcagtgggccaagattgtgctactgcactccagcctgggcgatagagcaagactccgtctcaaaaaaaaaaaaaaaaaagtgctccccaacctatgcctccgtgttcagagaagtagtctctggcactatcctgtttttctggttccttacctggcccctcttgtaatttgtgtgcctcatctggcctatgaattctcactgctgtgtgtttcatccttgctttggcactttgccctgtgtaccttctcgtccagttccactttcattggctaccatgaatatcatttctcctgggccccaggctcctatttcctgtccctgaaagtaggtctgggcttcttgggtcaaacaaaaatggtatctacaaattactttgtctcaaggagtgtttctagatatagttagtgatcaaaaatgtgcttccaaacaaggaggaaagcttgtgggtaaaagccttgatagtaaaaaagatgtttaaaaaaaaaaaaaacaaaaaacgtggcttactgtctctgactctgaccttattcaagatgttttcttgtcccttcttcccacacctaccaaaaaagacaccagagctgagaaccttgtgagatccactcaatttcagtccttttcgtgggtgtgaggaagacaataattaccagatttggaagctgatgaaggtgtcattttgacagtcctgagaacttaaatgttctgtttgcattgcttgcagaactatttgcaatttaggaagcggaatatttccaaagcatctttagtgacatggcttaaccttgactttggaggagtaagagtcagtcaaaggatgtgaaatactcagcttacattggctaagtgctcatagcatcaagtttctctaggggtgactgaatgggtcccagttggaatgaggtgagaaatgggactaaggattgcttcctgattgcaatggtggctagcttgtagctttcccagaaacttaaatttgctctgctcccccgggtgctggtttgcattcacatatctcagcaactgtcataatgacatgcaacagccacgccatttacagaaaaagctagaactctgtgttggtaagtaaaagccctccagcataggtatacacttagttgttccttccagtggttatcatacttcttttcttgccatagttacatgctaacaacgtcccaaagctatagttgctcttgcattttgttcttaattcttgtaagataaactaataatacagggagtaaatgtgcactgtttattaattaaaatccccgggacacgggataaactgaaggaaatcgtgctttttgaaaagtaggtgtagcttgccatgctgcattgtcttatacccacacataactctggctggcactttttgggtgccaggctgcatgcatctccctgacccactgtagacttcagctgcagctgtggtggacagtgcttatgcatccagcctgtttgccttctctcttctgcctcacggttctcccttgaaggagtttactccatccaggcctgtctccaaatagaggaaacttaatgccctctccaccaatggtgaaggggggtcgaggattaagtactctagctcattgtccttcaggggggccattctggagagcattttactctcgcttagaagttctcagtgggactgagtcccagttacctctctgcaatcggaaatcagttatgtattcttcattgacttttcctccttcctggattcgctcttttgtttccctcattcctgcttcctaagatcccctccgaaagtcgttatcttaggttctgctttgagggaggccaaattaagacaatcgccattacagaatgataaacaaatcactagaagcatctcttttagcatctccttttgactccctatagagaaagatagtttttcacgatttttttaaaaaatggaagccagaaaaatagacagatgaagaaaaagattgtttgtttcttattgtcatgttaagaaaaagaagacattcagaagccctgcattcctatggttatgctttagaaagcaagaagcacattcttcacaccccatttttcagtttttggcatgtcatttagcccattttcagaattcgtcacctaatggctactcccagttcaaaaccacatgtggaaaattataacaagagacaatgaaaagtcatctggctcagtgctccatcttcaggtgagaggaggactcaggttagagaaaaacatgtaaagagatttcacagtgagcttagcagaactgtgcagaccagcttctgggaaaactggttcttcaggatgggttccagaatttggattttggattaaatgttattgattaataagaactaaattggatctccaaaatggaactactgtactcagagtcctaagactagtctggagccgaactctgagttagaaggtgatgagctgctcacctccagtgttcagagtccaagccttctctctaaagagagttcatcactgctagcttgatgggagcatgctagagagaatctgagcttcatcaggagcaggctcctctgagatattttcaaatgtaaccaaaggtctaagataaataggacttagacatgcaatttttgttgaaagaaatttagtataatttgtattccatatgtaacacactgcaaatttgttcctgctggataatgccattttatatagccacacaattcaccatctcccaatcagaagacaacattttaaaatgacctttcaaacagatattagcaaggttttgaatgggcttatctgtcatcttattaaactaatttttgaatattctctcattccttgggagagtctctgcctacagacatctctttctttctaaggtaatcaactgactgcttccttgtcctgtttgctcactcagttgaaattgtgacttctggtcagagttgtgcccatggtgtattagatagaatcagaaggtaaaagggatcagaatgtgttcactgatcatgagattaatcccagaatttgcagaactctttgttaaaagattggggggcactttctatgtcacaggcactatggtaattgttaaggaagcaacagtgcacaagacccggtccctgttcctcctggagctcacattgttgcctgagtgaggagggcgaaccgtgggaaatgctgtgatgtggtggcacctgagagaccccacagcagggatgtgtaatctctaactggagagggttgtgcttttggtagggaagtgaggagatgtctgggctgacttttgaataaccagtaggaggaagttatgcacagggaattaggtggtgagatagtttttgaggagcaaggttcaatgtgctcagaagcctaggacaagaagtgcaagaatttgatacaatgagatatggctggagcatgtgtgaggaaattatggcaagagatgaggctgggcacaccagaagtggcttgtaattttttcctgaaagaattcaaattttatcttaaagaaagggaggtgtcatggatgttgtgtcaacagagtcatctgattggacttgtagaatattttggtattcaaatggaaagatatatgggacttgaggggtgggcacagttggatgcagaagactggtaaggaggctgtcacagggaacaaattgggagagcctcaactgtagagactgaaaaaagaggagaggttcaaaagttgttagggggaataccaacagaacataaagtcagtggagagggggaagggaagcatcaaggatgattcctagatttccaaattggacaactgggtgggtagtcactctgttttagaatataaggacttgattttcgaaggagatggaggtgagttcactattgcacatgttgagtctaatatatgtggaccatgggacatctgaggagaggtatctggtaggcagttgaatatgtggttgttgaacttcagacctgtatttgaactggatgtgtttatttatgaatcatcagaagatggaacgtagttgaagctaagggagaggaggtgaaactgtgaaatttgagaggtggccagagggtgaagaacccatgaaggaaatcaagaaagaatggccagagaagtagaagagaaaccatggagagccataccatagaaaccaaggagcaggagagtttccaacgggagaaaggtcaatagtgtcagaggtcacataagacgaggttctattagaaattgcaacaaagaggtcactggcaaccttggcaaatacagtttgagtcagagatagagataaaggccagattattgaaacatgaataatggagaagaaatgaagacagagtgtagaagcactctttggatgttggctatgaaggacagatagaagtaagttgatagctggaagaggcaaggccagggaagtgttgttattctttgaagtgtttgtgtgttaaggctaacagctcaaagagaggtgtgggttgaagttatagtcaagagagcatatggaaccagattcgtactgaggccagagaaattgggattccaaacacaggtgagaagatcaatcttagaagaagaagggatactttcttccactgaaatggaatgaaaagaggtatttgtggggtggaacaggatattgaggaattgtcagttgctctattcacctctgctaatggtaaaagaagagagatgaggtaagagtcttgaggcgattggtgaagacttttgtggattgagggaaaaaactcataatagatatggaaggggtgctgggcaattgctatcaactacatgtttatgcctccctctccccagttcataggttgaaatcttaatgcccaaagtgatggtagtgggaggtggggcctttgggaggtgattgggccaggagggtggagcccccatgatgggattagtgtccttatagaagaagaggagaaaccagagcctcctctctctaccactcaaggatatggcagggaggtggccttctgcaaaccaggaactgggacctccccagaccccgactctactaccttggtcttggacttctcagcctccaaaattcagagaaataaatctttgttgtttaagccactcagtgcttgattttttttatagcagctccagctaactaaaacagcagtattgagagactagtagaggcccaaggttatgaggctgcactgcatgattttattatatatatttattatttgattacccactctcatgtagggtggggaaggtttttagaatccgccaggatgtgggtgaagtaagcacaggaaaggcagatgtatgaggtaaaattggaggcatttagggcctagagagctcagtgggtccagaatgtaagtgaatatgaacaactgagagagaaatttagagggattagtagtggaagtcacgtccttgggtagggagactggtttgtctaagcctttgccgcaaccgttgtccactttgacttttctttagaaaaaaaaatacagtagcagtaatttacagctaatcacttgtaacaacttcccattagaattttaatttactttgatttctagatcattttaacaatgtgttttcatcttaagcttcagatcttaaaaaaagtatttcagttggcgataaattacttggtaagaaaatgggagtgtaaaaattatttaatggaatcattttcaaaaggaaagttacagtttctaatgaatatatgtagagatttttcaggcaaattcatgcagatgcataaatcctcaagaatgaacaccagaaaatgatacatggtgacggagatattgtcattggaaatggaaatatacaaagggaagacatttaaattggtgggtcgcatcgaaactgtgattcattctccctgtgcctaggtactaagttatctgagttagcagcatgtgtaatgactccaaatttagaaaaataaaataaaatgaagaggagggaaagtgctggcatggcgatttacagtgacacacagctaatgctgagatgtgaatgtgtgaccttgtgattacacttttggctatatgtgctgttttgctaattccagtcaccaagtttggtacacttgttaatgcttttttctttgacttaattcaaaacatcaacaaagtgcctttcttttggatccatcatcccgatttattatgctcaggaatgtccaggcttttctgtcctgaggcttttttgaggatgatgtctgcggtagagaccatccaaaggcaggcaaaatagcccatggagagagagaaacagaatggaacagagtgttctctgaactcaaccaagcccagagattgtagtgctgccccccactgagctacgggagtatactgtaaagaatatcattgccatattaagacttacgttttgaagttcaggtagcctatccatcattgtcaattaatttgtaccaagagctcaaggtggttggtgtagtagtgctcatatgttgcggaggttgtctgcagagcaaatagaataattcatttggattcatactttacctaattttgaaaatccatcccttacttttcatgttggaaaattggaatgaatttcccactaatggatttgttgaggaattcagtttcctctttgcatttgacccaacagcgcactggttgtcagcacttggtgttcctccatctcttccttccagaagggtctctgtatggtggtaggagatgaccactttgagcacctgagagggaaaaaaacaatctctgaagcaactcctgctgaacttcttataccggtgatttgtaacaattcaatgtgtgactccccccaaccccagtaagagattagtctggaggtggcactcagtccaagcaatgctaggagaatcagactgggccaggctgctcttatgctagcatatccccgtcagatggcattgtaccaaagtctgatatgaagggaacttttctctctaataccaggcctttgtttttctctatatattttttcttcattagaatgttaactaacctagctctgaaagtaaatcaagggtacttcctaagtccaggttatatgaggttgatgagtatgctaaatgtgaccccaatatcaatagctatagatgattctagtatggtgcttaataatgtggagtggaataattggtggcttagagatgggagtgggattgggagtgggttgaagggttagctgagatttcacatcttggtaaacctcatcataaatcggtaaataatatgaacacttatcactgacccataaaatacagacagaggctcttcttgagttggaaggagccattttggaaattcaaaccagatgcttattctgtctactgtataaatatttcctccaggtgttgggtatataagtaaaaggcatatcagtgtttagattacttttttttcatatgaaacaagagcattcttagaaatgagactaacagcaatgggcactattgtgccaccttgtgaaagtagatcacacaaggtaaataagtgctttattttgatgtaaggtcagtaccgtagaacaagatgatagcttagggaataatgctcttcttcatatgcctaaggaagtgcatgtagtagctttttcatccaccagatatgatacctaactagggtagtcttagctcagtcgtctcattcatttgcctaatagaacgactttggaatttttagaaaatgtagatactagaacctttactgagcttgagtttctggagtgtaaatggatttttcaaaagctccagagatgattcagattttctgccgttgttgagagccattaccttaggtgccaatgtcataagactttccaaaaagagattagagacatgaacaccacagtctctgttatttagatgtggatggacattcctcactcagagacagtaggttaagtatacttatgaaaatacgtagcattatatatactcacattcttgctcattggcaaaaaaaaaaaaagaaaattaaggcagcggtggatttctactattggcatatcaaattaacagattaaaaaattagacccttaggtccctgtttgtcgtattgttggtgataaagctgagagttggtacttcacattgagctaataggtatgtaaattggcagagtttttctgtacaacctttggcaatgtgatcaagaggcttaaaagcattcatatactttgacccaagaatatatgggaatctagcccaagaaaataatctgaattgcagactaatagaattccagcattatttacatgagtgaaacaatgagaactgcataggacatctatatggtgcaatagtttgtaattgtaataaattatgttttgaggagtttttagtaatgtggggaacacttatgttgttactgctaagagaatgcaaaagtttacatatagcatattctagatgtaaaacaaatgcctacaaagatagaaaaacaccaaaatattaacagcaatcatattttagtactaagactacaaattttaattcttgtcttcttactcttttgaattttccaagttttctgcaataccactttttaaaaaacatattttacttttataatcagcaaaaaaatacactcatgggaaatgctttaaaggcaagtattttgtggaagaattggctgtggaagatctcataaatgggggaatcgatctgtgaagggaagagatttgaggaaaaatttcagtagaccagaaaaatgcttaagttgttttccagcataagaagaaacaggaagctggatcataagcatgtgttttgaggaaagtataatgagtggctgaaatacgaaatatgagaagtatgttgtagagatggcaggaggcaagttgatgctggatggatataatgaaaaatatatttcattctcttcttttatgtcttcagagttgtgtgatgttaggaaactttcctaaccctttggatcttcatgatttgtttatattcatcaagtatatggttaaatgaagtaaacacaaccatcaaaggctgaatgtgaaaggaagcagatgactctactggttctgaaatgactttcttcttctaggccttttgttcttctccccaaactttaagaagttgataggcttggttggggataggataatgattcccaaagttgctggttgtttaatatgttagtattctagaagatatctctttcaaaagtgaacctgtattagttgaggctcacaggccatctgtctgacattgtcttttttagtcaatactttgatggaaagctctaaaggtacctggttgagaaaagctcataatttctcattaagttaggtaaatctgatcatttactgacaatagcccttttcctaaagcctactaagagccataacaatgtatttatgaattttccctgggtttttggaatggactgtttgtgtttgttagtatctctttcgttgcatgtcaacatttccaaagcatgttaaaacaattgctccatgttcaagcaattcgtaggtttaaatggctggttaggggagcccagtaaattcagggggcattatgattcgatagagctctggaccgactggttattactttcctatcttgtggtattgcacatttatttaaagctaatttgatattaaaagagtaacaagctattagaaataatttttttaaaactaatgtttttgaaaattatgatactattgcctttcttagtttaaaagagaatggatttctgaagtacacaagaccagagggtcaggtagtatttatagcttgctctcccacgcaaagttcagaaatccagtgactataggggtgccgtgagatacatggctgcgaaagatttatttggatcttgctattttaaatttttcaatctatcttaaaaatttgagagttcattttctgttatgaagaaaaatgcattactaaataacttgcaaagccctgtgtgtgtgtgtgtgtgtgtgtgtgtgtgtgtgtgtgtgagaccaaagtttatggcttttttatacttttggacttacgagacatacctacaaatataagaggtccttgattttttttacattctcctctactttctatcagtaccaatgtacattatttttattatttggctccaaatttatactgttttctatgtagatgaatgttattttccttaaatatttgatgcaagaatcacttctgagaattggcatttagatcaagtaattcagtttgtttccatttgcgcctcttggggaaaggctttggacttagtgctccaactaattttccatccaatactgcaaaggaaatgaccaatcagactgagaactaagagaaattatatcaaaaatccaaatcttcatgaggaattacttatggacttggctaaaaggtggcggatatttttctctttgtaatgatctacttaagctcaaaaactcaatagagttgaagatttttctttgaattcatttgggctttgaaaaagctgtgtaaaattggcaatttatctgtgtatgtgtttttagctcacaaacattttgttttggcccatagtctttggtttcagaaagtaagcaggctaacatgtgcatagcactgttgtgtttttaatggggatgatgggtttaggtggagatttgcagtcactgactaccatcttgggcttgtcagcatttcatgaaaggagaattagaagaaacagtataacctagtgaggtctttttttctgagtccagttcttactttctgtatgtatttttctggttgtctttattcctattctactgacctcaatatttttacttttgcagctggaattagtcaggttgagccgctcaacaagagacccctaaataaagttgcctcaataagatggaaatgcctttctctttcatctaacaatgcagaagcttctttatcctattaacttttcttccctaaggtgagttcctcatctgtatgctggaagttgtttcatcagcaccacatccaaaggaatgggaaggcagtcagtatcttttttttttttttttttttgagacggagtctcgctctgtcgtccaggctggagtgcagtggtgcaatctcagctcactgcaagctccgcctccaggttcaggccattctcctgcctcagcctcccaagtagctgggactacaggcgccagccaccacgcctggctgatttttttgtatttttagtagagacagggtttcactgtgttagccaggatggtctaaatctcctgacctcgtgatctgcccgccttggcctcccaaagtgctgggattacaggtgtgagccactgtgcccggctggcagtcagtatctttttaagggtgtaatgtgtaagttggacacatgactttcactcctattgtattggcaagaacacagtcacatctagttgcaagggaggctgtgaggtataatttctagttgaagaaccttgctaaattttagccttgctaaaattgaaggtggaatggcttaatgctaaatgggggaaatggagaaagaatactggagcttttagtcatctctgccacctagaataatagagaggtcaaagttcagcagtgtgcacccaaacctccattttcttcatacctgacaccatgttgcagaaactgaaagcttgcaacctgagggctaagactaatccattgcttgagataattctatccatgtttagcagtactttaaaagctttagatctgcttgcaggagggatctagaatgagtgtcgctactctaagctcagtattttagagtcagctagatttttctactccattgttgaggttttagcacgcttgctgcctggtgcttgagacatgtggttccttcagtgaatgctctactgtgaagattatctatattataccagcttagttggctttttgcaatgtagttattaaactttaactatttttaagttgtaataggcactgcatcaaaagaggggtatatcaacaagatgagtaaaacatagttcctgcctttaagggatacatgctctggcacactttttcaaaggtaaataagtgtttctccaaaaatatgttctgaggaaaatacctcaggaccttattgctaccatctatccattatctaccaatatcccctcttcccatagattccacccaagaagagcccctaccaccgacaggagttccgctcagacctgaattcctgacatcagtttccattttgtatttgttttctaaatctgcagcggctctgaaattgacctcacagatttccttggctcactgactgactttaaggcctcaaatgtctactagactaggctgcattatgatggaggcaacgacatcaaggctcacagtgtgaattttgttttcatgtttgctgttcagttccttaaccaatatttgttgaggatcttctatggaatgaagcatgtggggtgtgaagctgagtaagacatggttcttgctcttgagctgttcatcttgtaatgaaagaattacactattatgtgattcgcccactggtagaggtgtgggagatagagtgttatggaagtatgggagaaggactggctaatgtctgagggggttggagaagttagtgacatttacatttgaccttaaagaaggaatgagttcaccaaatagaagcagtcggggtaggggacagagtgaaggtggcctccctgacagaggggacatcttgtgcaaagggtgaagtgtgaaagatcatgggttcttgtcctcaacactaaaaaaccaagaaccaaaaccaaaaactccatcaacgcactataaatgatgtttcccttgaaataaagactctgttaaaacaactctatgtcacacctagattatttagttcgtaagaatctgaatctgaacaggaccattgtgtcccaatcaggacatgaagacagtttggtaaggaccctttagggatgctcatgttctgggttttcttagctctaaaaaatacccatatttcactttgtgagctcttttgccagtcactgcactgttttgtcaaccaaagtgcaaaggtagccaaggagctcagggccatcattaactattcacgtatttgtggaaagcctatgtgctaggcagtggggatataatggtgtgtaaaaagatatcctggtctgtcttcccacagaactcacatttaaaagacagctattaattcaccaattgcactaatgcaaactaatgggggcagattgagaggaggtgtggggctctaggcaaggggctcagaagcaacaaagcccagtggtgggaaggggtgtgatgtgtccaagaaggccaacttggagagagtgaaggggaaaggctcgcaaaatgagggctgtcagaagagaagtgttggggccacactacacactagaccttgttaaggatttgggtttttcgatgggaagccaccgaaagattttgaaatggagctgactgatttttgtttagaggaaatattaggtgctaaacaagcatttatggatgcttattattaatcgtgttatcaaatcaaagagaaaaactcctgggaggcaaaaacataaattgttacctaaaagcagtaacaaaatagaaaataaagttttactaattttacgttaaacagttttgtttactctttatagcaaatctggaatcatggaactgaaggagtcccaccttttagggaggtggtttgcgcaaggctgagtagtaagttggtggctgatttatttctgccctgctccatgagtgacactgttcctttccttccccctttcctgcctcccactcctgctgaagctttgcagataaggaatcaaattactctctggctctcatcagagcttctcaaaatgtgagagctttgattgcaaccatctccttggttcaatttctgtcttcaggatcttcagtgttgctgccacgccatccctgtctgtccccagggagatgccatcatttctcattgatcttcacattccagtctctccagtagtgtggaccagtcaacaattcgaagctgtaattggtagatcagcactgataataatatcagctaaacaatatataggcaatgggaaggtgaccagctgaactaatctcctagattcattttggagaatagtggaaagtaaagttgggtagcattcatgaaaattgtggctttatggaatgtgttttctaagagattggctcttttttttttttttaactgaaattttagaaagagctttctgagtaataagtcaatcacagagagggatctgtcattttctggcaagttgaataggccatgggaattttttttaccttgcctacactcactctcttatgaattatgaagtattatttttcctgaagccatcaagaatggcagggaggaggggagctagtccatatattcacttttcctctgcacgtctctagggttttctgtctctgcctctttatccctgtctccgcttgtttctctctgctgttcttcctcttcttttgcctctttggcatgaaccagcagtagcatttgttacaggattttcatgaggacggtcttctgggcagtgttttgtgacagggtggggtggtccaggagtggctggtggggatgatggagcaagattccagacaattgaggaggccagtgggagagcgctgggtacacccaggtacagaggaaacacacagcgttcagtggggtggctgagggcgggggtgctgtcactaggtggaggaggtctgggcaagcatgacagccttggcacgaggagcagtcagcctggccagatagagcaggtaggctgccggcaggagctggcatgaaggtatgagggcagcaggaggctgggctcagctctggcggctgagacctgagactctggtgggattgagaggaccaggccggcatcaggggcaaggtttagcaatcccaccctagaggcaagggcatcagggctttaggccagaacccaggcggagaatgatgagaactaccatagcagccctgtgcttgcttgtggagcacagttggtgccaggtacccatccgaacgttttattagaccaaggcttttaatttgcacaatcttcttgatagaatcctcattttgtaagtgaggaaatggaggcacaggaaggtagagtagcttactgagcgttaccctgctgggaagtggcacagctgggatatgcaggcagtctggctccagggtccctgctcataagcactttgcttcatggtattcttgttacatatcacagggaggaccattcacatggggtgcatggggcccttggagctgggcaatgtgggctgccctgattccatacttcttcccttaaaaaaattaaaaaggccaattcttccacactgcctcctatgtatctttcatatcttaactcattaatttcaaaactattatctccatggtcttcatggggcctggagagactctggacatgcctgcctagttggtaaggtctgagctccgcctcagagaactacagcagaggactaatagaagtggaatctgttgtctgtagtttttttgtttgtttgttttgttttcattcccttgtctgccctgttgctaccacctatctgatgggctccagggaggaaacagggttatgatattcattcttgcaatgccacacagatttctagaggcaaaggagtggagtactattacttgcagagcagaagatgagaaaattcatctagcacactgtagtcacttagtaaaatttaaacaaaaacaaacaacaaaataattcccaaggctgaattggcaaacagagaccttgggcttgtgttctagcccgtggagccaacaggagggctagccttggctgagtcccaacattattcctttgtctcttctctgagttcttgcagttctgctatagaacgcataactacactggctttgaaaagttaaattcccgagaaatttaggtggaaaattagaatcagaattgccttttgcttctaaatctgcaccagtttgtcttgatcatggctatttaaatctcatagctaatagctaatcttctcactttggcttttctctccttcttctctctgtccaaacaagtggaaaacagaaatacctgtcctttgtactctactgtcaatttcatgggttcactctatgataaagcccagcacgggtaaggaaaagggacttaatatccctaagtttgaagcccatgaaaaagaactgaaaataatgtgtccttgtgatacaaaatagagctgtcctaatttgttgagggacatgccatttcctccacttaatttagctcagtggaggcatttgtcaaattgcaaggataccttccccatcatgaatcacgtggcatttataaacagaatcatagagatgatgctttttcatagggctttttttgactttgaactgttgatcataatgagagataactggaaaagagttgagtcagaaacacatttaacagggcattctcagaatcagaggcagcctccttgaggctatgcagttttggaggctactcagtaatgagaggtaggtgggttcctgggaagcaccagcacaagatgagccccaaggttttcaaacttgttctcactgtaacctcaggtgggagaagtaggccagaaacggggtggtttctctttcatcttcttgaccatcattcagctggagaactgttaaagtcaaaaccaagaaggtgccagtgtcttggttgcttttcactacctgctgcagtgaagtgtgaaatttggccctaggaacttgaacttgctggaatccatagacccttttactaaaagctggggactggagctgatctgaaacaggctcgggaagctcccagggacgtctcactacttctcagcctggtctcagtttagagaatcttggggcagagatagtcagttctaagatctttctagagttctgagctcacttttctggaactccttagagttcctctggggaggttcagagctgagcgtctcactggggttcctctggaactctgggatcagcccgagtattgggttgaaacccttaggtgactcacaggtgtggtgctgattctgtgtagatccagaccctaggggaagactccccaacctgtgatctgatttttagttatcagctgtgggtgaacaaaatgacttctgatgggataattttttagaatggaaggcgtgggaaaaataggaatttccccaaaaagtgacttctctctatttcaccaaattcctcttgggaacacgcctactgcccctcatcttgaaaactcttatcacggaggaagtgggggaaggaacactccagtatagaacatatggctttgaataaagtaattgaacctttgtaggcactaaaaggccagataaggcaactcctggtgttttcccacctcttacagtttatgattctgagtccagcacatttctgacttcctggaaagcaggcagagcctgccccttcacatctattcttagttagaggggttgggtgcaggagcaaccacaggctgctatatgtgatccagtgcctccctgctaacatccctccctggtcagactcgctgactgcatgcattagggtaccgtaaagtgcgcccctgctctttaaaacttcctttaggccctcacattggctatagggagcgctccacggcagccatccacagaagagccgagctatgtacagtttatccagttgggaacaatttgtctcatcttggtgaattgtgaaagtgggctgcctctgtcttctccccttaatttagatgtccattttaacacaatcggggaatatctatacttgcaattgaagtggtaaagtcgggaaatgatctggagaatttaagagaaaaaaagaacctcttgtctcagttttctgttgattctggttgaaataccgtatggctgtaattagagagttaataattaaaataagagtctgacacatgaatttgagcacagcagccctttgatctggtcctcttggtgtatgggggagggaaccgaggttccacgtggccagggactttctccaacatgcatccttgtcgacaggtagagccagcactgggtttctctctatggaatcccgttgactgcactcatcccctgctgctgtcctccctccatgggggcacaatctcagaggtgacaatctgttcaaaccctaccattttaggattctgaaggacagcaatatcttcttgctatcatttatatttgacagtggactaggtattgatgccactcccaagatgtgcgactgtgattgaaagacatgaacgggtcagcacagacctggaagaactatgctctgctcagctgttgtagccgttgtgttattattttgactcaggtttgttcctttaagagttacgcttttcagagatactggctggaaggacaggcctcctttcctagatccagggccagccagttactcttgtgctgagctcccatgaactgcagccagtgccttccagctgacaaagcagcttctcaatggtaagtgtttatgttgcactttagatttgcagagttctttccctaagttatttcttacctcattttggcgggtgaagaaaccagagcccatcaagatggtgactgactggtccagagtcatctgaccaattagtggcaaagctgatacaggggacttagagcctctgagtttctgggtcattacttacccagtcagtcatgcagcttctctaaaatatgttctgtgctcctcaccagcttctttgtcctcctgaatttagctggctacttttagagtgggccataaagctctcctgtttcaaagctgcagcttttttttttttttttttttggttgaccagaaagttctaagtacctagagaaactcatcccaggctgctgcaatgtgggacctgtcctaggtcacctgagttgcggtgtggagcagcaggcggagggagtctgacgtttctatttgggttttggggaaaagaccaatgccacttcaggattattaaagatttgtgcatgggaaggggatgaagaatttacgtgaagacattggctgttgcttaaagttgatttaaaaacattcaactaaagagcattaaacatttcacatctaaaagttgagaagtttttggcttccttttcaaacttcaccagttgggacacagagctcttttcttgccagtgaggcagagagacttcaacgagaatattgaaaacttttactatagaaattcccacaagaaatcttaccatctgtttattctagtcatttttttcttcacattgggtgtaaagattttttttatgactcattgcccttttgacttaaatgcatctgttaagtacagatgttggatgagattagtatctgtttacctgtctttacatgatattctctgaaaataaaatctttcctttgctcccttctccaattgtgaatttaattaagaagatgagcagttgtgtttggagtattcaatagtttgcctttccaaacattccacgcagccttttggatattgataagtgtttattgtagaactaacaatacaggcgaaacaggaagcagctctttgctgggtaggatgctccgaggcgccctccactctccgagggaacgctcttcagctgactgaagcagggaagccgagccaatcagaggccgctttcctagctcagtcaccagtctgtggttgaggaagggttttgctttttgtgctctgtattgggaaggcagataaaatgccaggtctggactgcctctggggataacctcaccctgtgggatgtgaatgaatagcatcttgcctggtaaatccacaggaattgataaggcaggcgcagttctcccaaacaggccttttctctttaagctgtagctgtggtttctgcagcaattttgtttttgccttgaaagaggtgctctggattatcacacctccatgtatgacaatttgtacctgcatggaattgaagactcggaggctgtaagtattttcatagatagctaattccctctcccctcctcttcctcctcccactatcccctccacccccccgcttcttatttcttaggcaacgcagggaacatggagcagaaagctaacatcattctggggcttgctggctgctgtgtaaatgttctctgtgtagtttataggtaactaaaattatttattgtcaagcaaaaaagaaattagggtgatggcaaagcattcaagagtgtaggctgtttgaatttatacattaccgggtccacgtttgatctcaccaggggtaactgctccttgcagactggtttaaactatgcagaaagtgcctatgttttccaatagcagggttcatagaaaagcctcattcattatataatacacattgtttgttgagctagcatgaatggaagttcctaagctgtggctgtattattatgtgctttctggccaaacaagcagtgcagatatactgcttctttgttaaggatatcagatgctaggcttgtggccatacagcaacccagtgcagaggcagtgggcagtgttcctatactctaccttggaagagcgaagcagactcacgtgtgttttgggttagagaactggactccttctcccccctaggtcaggctcatgcaatctgttaaaatcagggtgaaataatttcctgaaatccctgaaatcataccatagagtgctagcttttaaatataaggtaaagctgataattgaatctttcttttgactcttgctggtggtagttcctatttttttcatcaatacacagaaacctcgcaaggtagaatggctgggggtggttaatgggaagtgctgtggggagtctgaattttatgtgagtgcagtgccaatacatgttgctacatttgaaacaggagtgtgttatataagattctctggctaaaccaccaaataaacaggttataacaaaaaaaaaacaaaaaacaaaaaaaaaccctgtggtatacgtcaatgcagacgtatatgtctaatgatgtgctatccatgaaagatagaaatcctcagttctgttaaggcattccatttttccttcctgtctgtgtgttttctctaactctaactctgtttccgcaaagtctctctgcgtgttgcccaacgtgctcataaatgatcagactgtcagtgtattgtaagggactgtagtctgaaacattggtggctgaaatcaagaaggtccacacttgcaggtggggtgggggaatggcaaaggcaattacaggagttcagtaagccagcttcctgggctggtttcttcagaaggcctgatcacttcttctaccccttctctgctcactcagttatgaaacctatgatgccttgtgaattgtaagttttattttcggccattgattttaaacttgggcaggcagtgaattgcaccgaagtggactggagtcattttagaaatgcctgtagaaactggctgctgtgaagagttggctaggaactaataaatccagctccttgttctccagaactgtatacatttcagatgcactggttcagaggggagccattataagtatgaaaacattttttttttttttttttttgcctttgggtccagtgtcacaggacagctgagtttttctgtaagatgggaagtgaagagtgcagtgacttgactcggtggcagtagttgatggcgggtagtgctaggtactgcagtgctgtactcctggtgactcagtggtggccagcaggctgagatcctccgggctgtgcacatctgtggaggtgaggaaggtgggaaacatgaggagtggagttgggcatctggccaatcctcagttgagagtatgggaggctttcaggtgggcgggattgaaaccgtgtcacataaatcaggggaagacagagatgttcggaggggtgaactgactctgaatgctcatttgagtttatttgtttttataaggaagaataatgtgatgtgttacccaagatggtgtgaacagagcttcaagccaatggagaagactaggcctaaatagctgacctggtgaagtgacacataaagccacacctggagtgccacctcctcagcagtctttctcagtgccaatgcatttatggctgtaagtgtggggggttgtccagatggaagcagagctctcggaacaggtctggtggataggcgtggaaaggcttttctcagatggccagctgcagtccgagaatatataggcactaaaagctgagtacggcacttcggttgggggtgggggttggggaaccatccgcatatgtcctaccgttctgtgctgttgaaaatgtctttgtggggtgtgtgggggttaacttgtgataagtgattattttcaatgttttcacacagtaagcttgtaataagatcatcttgcctagggacaattttattccgaataagagtaaaccattattatacactgttagcacctcacatccccacagtaggagagagatgttggtactgtgatgcaaggctttcttaagagtttggtccaaaagtagatgttatgctcccagtgccctagattttagtttgtaacctccgtgtttcacatactctatatgtgaagagagaggaaaaagaaacatgccgaaacacacttgagtcaggcattttagattctttttttttttttttttgagacggagtctcgctctgtcgcccaggctggacattttagattcttgagtcctgtggagcctttttgggcaagtccattaacttctgctttggtgtccaggagggtagttaagaatctggattacaaggaagtgcaaaagatcattcagtgccccacagcagggccccacttccgaataggagatttcacacagaacgtcaccttacttcttgtattaccttgacatagatgatggagtgtgtgcttccagatgaacccatacctagcccaggctggttccagtggatcatgcacatcgactcttcctacattagctgctatataagagctgcctattctaccttcactgtccccactgtgtgttaatacaagttctagtggccaagatttttttcatggactgagccccccatgtacactatactatgtgttttcatctgatttgcagtagatttcattagacctgctctttagtgtgtacgtgtatttcataaatggattcattgtgtattttgatgtttgtggaattattctggaaatagatttattttttcattcatcaggtttattacacaaaccgagggatgttcttatggggatccatggacgcagcagagaaagttaccaaaaacctaccacccagaaatagtcattgttaatatattgctacacaccctttcagatgatcaatccacatatatgtaaataggtcagtctcaacctgctactgtgtgttgcaccctattctgtcaaatgctgttcttacttgagaaaatgttgagcatactaggactagaactggcctgcacaggagacactttgcaaaatttaaagctcctacatggaccttctggaattgtgagtagcttgaaatacggattcttagggtatattgtacggtgatgccggggttagttgcacataggagtaatagttcatttctctgacacaattgcttccatttccaaatgcttaaattctaaagcatttagaaagagggacctgatcttttcctgtgaaaaagatgatcagatcatcattcagggcaatttccagagaggaaaatatagtctttaagtgttttcaatcatagaaaggaatcataatatattgattaatactgttagaaattttatgtatgtaaaagttacagcaaagtaaattttacaaacttaatatgtatgtataacaatatctgagtgtatatataaaagcacatacttaaatttacatgtacgtacacattattataagaatagctttgtgttaaactatttattttctataagctgtggaactatgtatgtttgtctcaatgtctgtgcacctctgcatgcatgcgtactgttcaccctggtaccttcacctacattcatatacagatatgttccatgcatcgctaattgatggttaatgctaagtgggagatgtctactgtggagcttttggagatggaaaattagctgcttttgatgtgaacaaagatacccaagagagttgaaaggcaaagcagcctcaagagaataaaggattgctcctttcaaagatatagtaaagttattttaaatatgaagatatatccttgtgcttgctagggaggcggataaacttcagacagaaggatttatatgtttaggggccttcagaagacactttagggatttaaggattagatttcttttggaaacaagaaggccagaggtctctatggtttggtggatcagagcatctcttctggagtcaaaaagtctttctggcctatttatagagaatgaggactgatctgtaagagaatccaaggactggatgttggcatctctgaccacagaagaaaaccaaatgttgctcctggtttgtgtagggaatttgactgagaaaaatcaagttgttttactcagctgagctgtgttggtgtttggctaggggtgtgttaagtaaatgacaaacagggctttctcttcaatcagcaatgatggttttctaaaatatatattgaaattatttctagatataattggcatggagccaaagagagaaattccttgaatcgatcagatcccatgaatttgctgttccagcttgtcaatcttgctgctttcttgttaattttctatttttgagtcacagaggcaagaattcggatcaatcctcgccaggtacttccatgtctccttttctgctgctgttattattattattagattatgatgagtcaatccaggattttagaatatggccctgtgactccctttgtatgtactcaatggacattccattattctgtggtgcaagacattctgtaaaagggtcagcaataaccgtgaaaaatcattattttagggtgaaggtggggaggcttcccattaccttagctcttctctttctgtggggttcagcttggaccttatttctatgtcaacagttctcccattctggtcactgtctcccctttaccgtctcttacccaggtgaacaaggccacttaaggaggacaagaggatataactggactggttatcatcgttcattctcttctcttccctctcccacttgtcctttaaaataatcatgaagccatgaactcagatatccataacattaagttaaaaattgtaccaaggaagcgctacagatataggctctgtgttctcatctacatcggctgatttaggggcctttcatgtgtttgcatcaggctctggcggctgtgaaaacagcaacagctgtaacctgccacactagaaaaaatacattcattgggtggatccccgagttctcacaggaggctggggcactgccgtgtaaagctagcgccctgccctcagaacaacttagtgtgtaaaacctaaaggagcttacagttcatataaaataatgacaactttgagctttttaagactttgaagggcgtgagtctaagataaaactgtgtggctatttttacagcatgtattggtatgccaaaagaaggtagcccagatagctcacgtgacaatttttgacatctaaatagaccaatacttgctcttgctctacattttatattcttttataacataactatatagttttagttataaatattttcctctctttttaaatggtgccacattatcagtacttcctgtgtccttttttttcttttgtgtctgtcatgagaaatattgaaaagtcttatatttaaaacaggatgttttgaatttgcttttagccttttcattcagaggagttgatccaaggtatccactcagacatggagattggcaactgtcaattactcaggagcttgtctgtgtagtttgtggaaaaaaaaaaacaacagttctcttattttgcctttcttatgcctgttattccttaatctctcttttctttttagcctgagcatcatataggaaaaagattctgaccttctacgttattactctattggcagctttgttgaaaagtttggtgagtgataaggttgtagttgaaattgtttctagatctttttaaatctccataagacttaaaaaattttgccttctattgggcatatctatcagccaggaaaatttctattttactttttgtactttgtattatgaaaaaatgttgtagtataatagtgtcatgattgaaagtggagacagaccaggcgcggtggctcacacctgtaatctcagcactttaggaggcacagatgggcagattgcttgagctcaggagtttgagaccagtctgggcaacatggcaaaaccccatctttgcaaaaaaataaaaataaaaaaaattagtggggcatggtggcatgtgcctgtagtcctagctactcaggaagctgaggcaggaggatcgcttgagcccaggaggttgaggcttcagtgaggcctgatcatgccactgcacttcaggcttggtgacagaatgagaccctgtctcaaaaaaaaaaaaaaaaaaaaaaaaaatgtggagacagcgccatattgccaggggttgaatcctgactttccctttcctactttgtggccatgggcatatttcttaaactttctgtgccttggtttcctcatccctgtcaataatgatagaacttactttttgggtggttttgaagattaagttagttaatgtgtataaagcccttaaaatcagatatatattatctgccattattgttatacatataatgaatatacttacagtttcagtaactaaatatgctcctccttctataggttctgatagtcccaccaagttttttggtttattttcagagcccttgcatggtttttgacagtgatttccaacaatcttatagtggttgacaggtgaaagaattcagtaatccccaaaggccttatgattagttcattgtattttgttttagaaaagcatgtggtaaagtgtaattgaaataatgctgggaggctgggcgcagtggctcacacctgtaatcccagcactttggaaggctgaggtgggtggatcgtgaggtcaggagtttgagaccagcctggccaagatggtgaaaccccatctgtactaaaaatataaaaattagttgggcgtggtggtgggtgcctgtaatcccaggtacccaggagactgaggcaggagaatcacttgaaccctgggaggcagaggttgcagtgagccaagatcacgccattacactccagcctgggtgacaaaagcaaaactccatcttaaaaaataaataaataaaagaaaaaagaaagaaagaaagaacgctgggagttgggaatcttggtctttgccacttcttaacagtgaccatgggcaagtcacttaatctctgactctgtaatcctcagtttttccctcgtataaaatgaagacatttgagtagatcattttctaaggtttcttcacatgcaaaattttgtactttttgctgataagcagtttcttcaattaagataaaaatgtcaccatatgccatttgctttttaaaatgatcaattaccacggtgttttgtacatactgagtaaggtatcagtgttcggaccttgagtctggatgtttggcctattcagaatctttgaaggaagcaggtatatgtggtacatatctttgagtagagtagatgtttgaaaaggaaaatgttttatttaagacttttaattctagaagccaaaaaggatgctttgtctattgcttgttcgcttgccaatacccatggtgcacttccagcccacagtgatttgagcttggaaacacttgagtctcatctctaaaaaaaaaaatcaaaagcaaaagctttctgagaagtaaatttctcctaactcttactaatgattgaggaaaggtaattctgctttaaattatttttccttcttggctaaggtatctgagctctacactaccagagtattgatataaaaatattttaaattattgttttgtgattatcctgcttaatcatcaagaatatttgttgttcagtgttttcttgctttacagaattttcttcagctcattattattatcctttgggatgtcctaaaaccaataattcatcagttgaaaaaccccaggaatacaatcaattctaggagacagtcattaattttaaaagtcattcattacttttaaaaggaataattgtgcctcacctggttaagttccctctatgataaagtgaaaggatgcaaagatgagagagaaaaagtcagtcctgacttgagcccaatctctcaaacatccctttaaataatgttcgcatgaagtaagggctggaggcaagtatttgtcaagctagaaaactatggcgaatgtcatgctaaaatggttagtgcataaacagattagttccctagcttatttccaaagagttattattgatagcttaatatcatctaacttcaaatgatgtcctggagattaatgtcttggggtttacttgattcaatggttctattgatccaagtgatagaattaagaacctgttgatcaaattttcaaatcatctcacttgatcatgttgttaacgcttcgaatataggaacggaaccaaggtgaagttgataaggtaggggagcacagaaaatttaattatgatgcacagggccctttgtgaagtgctaggatattgcagagcagggtaaggaatgaaagcacacagatcaaggaaggctgggtagacattagatttcaaaaagaaaagaccacatgatagtcacatttcatatttagttaactaaaacccaaaaatttggtacgtaaaacataatgcatattcctagagtgccaatggcggtatttttctgtattgtcatatccctaaagtcatattttgtactttattgatccaagggcacacttttcctcccatgtttaacatgtctaacacagggctacatcttaaaactaatgttgtcttgcagttatattggcagctttttccccttagtggtacataatctaatgttgaatcttaaaaatattgatatctcaaattcagtgaaatgggaatatttgggggaaaaatctttaaacaatacaaaaccatagactgtaaaaaataagtcttccttgatgacatcctaatctgctgtcctccccactggtagccattcttaacaattcagtggatatccatttctatgcattgacaaacaggaatatttagaaaaatgtacttacaagcaaacgtgtcatatttgtaatctttaaaaatgcacataagatcataataaatattattattctgacttgctttctttacctgaaaatgtactgtggattttttttcatatcaatggattcttcttaataaaaagtgacataattgctgtgcagcgtggtttagccatgatgaatttttcccactgatagagatttagactatttttcatttttcagtcctacagttaaatgctacagttaacattcttttttttttttttttttttttctgtgagacagagtcttgctctggccaggttggagtgcagtggcacgatcttggctcgctgcaacctccgtctcccgggctcaagcaattctcctgcctcagcctcctgagtagctgggattacaggtgtgtgccaccatgcccagctaatttttgtatttttagtagagacgggagtttcaccatgttggccaggctggtctcgaactcctgacctcaggtaatccacctgcctcggcctcccaaagtgctgggattacaggcgtaaaccaccgcacctggcccaacattcttttacatgaatcattgtgtacacatggagcatttctccaaaacagcttcttagaagcaaaattactggatcaaaggattaacacattttaagacgtatatatattggtgagcattgtaaaacatttttacattatacattcttttttggttcagaaaaaaaccaatttagttcaacctttttaacttgaaatgtaagacttcaaagaagtttcttgattgtggagagcaactttaggatatgacctccagattctataggaagaatttatttactctctgttgtgataatttgttttggtttaaaaataacacacaaaaacttgggaagttccatatgccctcatcatatcaaagatgaaacagttgaggcccagagagattaggccacttgtttagaatgacgcaatctgtagtagaagtggacctagagccttcctcacatttttttttttttttttttttttgagacggtgtctttctctgtcacccaggctggagtgcagtggcgcaatctcggctcactacaagctccgtctcccaggttcacgccattctcctgcctcagcctcccatgtagctgggactacaggtgcccgtcaccacgcctggctaattttttgtatttttagtagagacagggtttcactgtgttagccaggatggtctcgatctcctgaccttgtgatctgcccgcattggcctcccaaagtactgggattacagacgtgagccaccgcgcccagcccacgtttctttctagagcaatattctttttaggatgccaaattccaaggttagtactataaaaaactggaataaacctgaagagtggtataatcgtataatttgtatggtttttgacagcttacaaaacagttgggagttgggagaatctccaaaacagagattggattgctctctgacccaaatggtgagaactttatctacttgtagaccagatttgcttcccaatttctttcaagcgtttgtttgatgttgctttatgatatggtttgaagtcccaagttgctgatggattagaatgataatacacccataaaacttaaatgaacataaaatttcaatgctagagaatgtcacaaagacgttttgtgttttagggaaatgttagtgttctcatgatttgtatgcaggtcttgatgacagttgcaagttactgctacgtttggccttagccatgagcatccgaatttcatttttattctctgcctttctcatttatgattcatctccatgagcttccaattcaaagaaacatttgcatgattcagtagcaatattttttaaaaggtaaaaggaacagcagtatttgtaaaaggtacgaggaactgtaagttctgggggtgggggtggagagagtgtccctgacaacatgctcaaattaggataaattgagagggtttaataaaatgaaaaggtattggtagggtgcaaggaaaccacaagggatagtgctgtacccccatggctagtaagtgcattcccagaaagggtgtggttataggaacctgggaggactgagttgcatccagaaagctaccttgagaaggatgcagctttccctgtggatggatacagccagctttgaagcatcccacaaggaggaagccagagaataaataccctaatcttagtctcccttactctgatccctgctagggtgccttttggccaaactcagccagaagccaaagagcagagcttaccggttagccatgcagtgcaatagcagagtggggaaggatgaagggtggtttagagaggtgatttggttccatctgtattactgtattgtctgagtgtatattcacacaagttgatgaaagcatgcaattgggagacattctttttttattttttttgagacagggtcttcctctgttgcccagtctggagagcagtggcgcaatcatggctcactgcagccttggacctcctgggctgaagtgatcctcccacctcattctcttgagtagctgggactacaggtgcatgccatcatgcctggctaattttttatttttttgtagaggtagggtctcactgtgttgcccaggctgatctcgtactcctgggctcaagcagtcctcctgcctcggcttcccaaagtgctaagattacagccataagccactgcgctcagcctgaagccattcttaaagcacacctctgaagatgctggtgaggctctgaaggagctgttgttggtcgtcttcctttggagatgtgtgttggctttcatatgtgggaatagtttcactgcaatcagtctcctgggttttaattcctgtactgttgctttgacgaagaccttcagcacttcaacaaaatgtctagcaataggagcaaataaaagatttaaatgttagttttgtggagaaagcttgagaagctaagctaagagggcttccatgactgccttcaaatacccagaggtctctgtggagactgagaagataaaggaaagtgcgaatgagaccaacttgtgtcttagatgtgctccattgtcatggccaggccagaataatttttgggatctctccaaatgtcatcacgttgtgattcccaccacatataatagtgagaggagtggtgggaacagggattagcaatgtgagatttttacatttctgatgacagcctccttattaaaagatatgttgaccgggcaggggtgggaatgctaagaggagcatttcctttacatggatgatagtagcttggaggccaagtcttgccatttttagtcaagctaaaacagaccccatgtgtctgtatttaaaaatcaactttggctactggttttatggtgtgtaaaatatgtgaaaatccattgatctacatgtatgatatgtgcacatttctatacatgtgttatactttaattagaaattttgggagtgtcttttggggaaacaagtgaaactaatggaattctgaaagctgtgatcaggattaggatggatataatgaaggcccttactttccattgctaagacttacaaaatgtggaagggagtagattcatgccctcactagatgctggaatcctgagtgcagaaagagcactaacccttgactggtggaccagttggccaaggattgggacatgtaacccatcactgggatatggtaagagcatgcccctccagtctctggaacagaaggtgctctcattggtgatgttcatggtggccttttgcttcactgccctccctgggaccgatcgcaatggtggtggttatgtgcccagccagcagatacctcccctctctgaatagccatgattcttaagataaggcgaactcgggggaagtagattttctccttgcttttagcagtgtctgcagggtcaaagccaggctgttctcagtggtgagagctggtccttatgcttacagaactgtgccagtggccacaagagagagtcaattccagcaataaggaataaaatgattgccatgagtctcagttgtggtttattttgataagattctaaggttcagatgtttactcctggaagggtgtgtgcctggcatatggtatacagagacactcactagagaggtactgcatatgtctttaaatatacttaaggggctttctgaaagctaagctagcatacatgttacatgaagactgcttggattgtttcattttcacagtttaaggacttaaaataatctacttaaaattgatttctaatttttataactcaaattcttaaattattactagtgtagagtgcagtgttataagaacggtgaggcagatcttgtaactgaagtacactgttaccatttgttatgggtgcttttcatcagttcagctgtaatattttgaataactatgtgtgtctgtgaaactccttgaatcagagctacaatataaagaactatgcaaattatgcaagatattataacaggactttattaagattgaatagtatgttgataaatatgatattgttctgctttggttttgaaattacacaggtataaaaatagctaaaaaattgttcctcccacattccaaatataaagtaggtaaatttacccctaaaatttaagagcaagaaaaaaaagagtcggatacaaataagatagaaaaaggatgagaaatgcataatctagattctatgaatgttttgatttatattgcttttaactaaaatatgttctggctgtaagatgtacaactagttgttacatttttcatttgagtgctgcatttacatagagaagctggctttcaaaatgccagccagcagccaactcaaatgtggaatatttgagtctaacttagtgactagttttgtaagatgtcttgaggaggttgggggaagggtacgcatgggacaccttgttctggaaactcagccagaattttgtcagctgtgattcatctgattcttagggtatttgaatttccagttcctaatttagagcttgcaaagatactgtgaacccaaagcctcacctccatgtatttaatggaagatgtatagttttgaagttccagattgacttccggcagaaaatgaggacattcagcaggctctggctataaactatatcatttctttagaagtataaaaagtgtccattatcctatcagcatttgtgttaaatgacttctgagattctctaatcaaggatgttgatagactttggaagcatttcccagattactgattgggccttcctcgaggtccttagactccaaggaattattggacctgtctgctatactgggaacagatcagacactgataggtagttgttatctttgtacctacatttaaaaatacctagcctcccatttgaaaggagccctttttctgtgatcacatactgtattgatgtttcgcagaacatactgtgagagaaattatttgcagtaggtaattgggagccgttcacagatttttaaactggaaagtggtttgatcagctgtgcattggtcagggtagaagatggatttgaggagaggaagaattcaggcagggagtccaaataaaaagctgtggaaatagtacaggtgtgagctgatggaagcctgaactagggcagcagtagtggggatggagaggaggaggtgaactgaaaaaatatttaagtcataaatgcagcaggtttaatggctaattagcttatgaaggaagaggaactcccactttcggcttaggtgactgaccggttggacagtgatgccactgagattggaaaactaggccatttcttctgatatcttttccactgaccctggggatctcaggttagaagccaggtcccggattgaaggcctcaaccctttagccattggtttctggctaagaaagttactgacttcatcccaagatcatgaaatagtttcgttctagacagctgggactcccggttaccaggaacttgctgccaaataatcggttatggctctatctgttccgggcctgtacctatcctcatataccctattatgccatgtttggaaactatagaggaagcttgccatatattatccttttacattaaatatttctttttctatttagaagtagattgtaacattttccagagtctctcatacttcttatatgtggtagatgagtttctagccattaatttatgcgcctgttgatacatgtgaaaaaaacaggtccctagtcaaataagcttgataatcaccatactccgtccctttctcaaaagattcacagcacccagtagcccactaatatctgttagcattccacaataaataaaccaattaaattttatttaaccccaagatattccaaacttacttgatctcagaatccatttttttccctaaagaatacctattaagtacttgaataactagtatactacagaatacaattagggaaatgctggtttagttatttacaccaggcctcataatcactgcaaaccatctcagtgttgtagactggaaggattttgtgggacagagtgaagttaacgttaaatagatacagtatatatatttctggggcctccctcttaggagactttgattcagttagtttggagtaaggcttaggattcatatttttggcaaacgctccccaaatcactttcatgtaaattctttgagaaatactgggtcaaattattgtcttggtcagctcgagagtttgtgacagtgcacacagcacttagtttccctgttcttttagcttcttgtccacttatttggggtggtaagcactttgaagtatgaatgtctttctttaaataaaatgtaattggtttattcatctccctatccttaccctacccttgcttgcctcaagacgggcactcaataaatggttgttggaatgaattgaaattcaataactttaattcctccaggaatcaagaggaatctagggaatggtcagaaatgattgaacacaatatattttatcagggattcccaagggacacacacacacacacacacacacacacacacacacacacacacacacacatacacgcccagccactctactttttttttctttgaaaaaatcaaagtgaatttaaaattgggggttagcaggtttaggaaattaaaaggcctatattctttcttttttttgagatggagtctgactctgttgcccaggctggagtgcagtggcacgatctcggctcactgcaacctccatttcccaggttcaagtgattctcctgcctcagcctcccaagtagctgggattacaagcatgcatcaccacgcccagctaacggctaatttttgtatttttaatagagactgggtttcgccttgttggtcaggctggtcttgaactcctgacctcaggtgatccaccgccttggtctcccacagtgctaggattacaggcatgagccactgtgcccggctggaaattaaaaggtctgtattcttaaaagagccagaatatgatgagacactcagctatattgattgtaaaaataattggtggtagtgttagtctccctcctcgcctacaatcctagaccctattccctagagtaaacacttgatagtttgtttctttaataacagcttcactgcatataattcacataccaaggaattcagccgtttaaagtgtacaattcaggggttttactatattcagagtggtacaactacaatcatcaccacgaccaatttagaacattttaatcaccccaaaaagaaaactcatacctattagcagccactccccatctccttccaactctctcagccctagggtgtgtttgtgcatttgcctcttctggatatttcgtacattgggaaccacacaatagacagccttttgtaggcttctttcacttagcataatgttttcaggatccatccatgttgcagcttttatcagcatttcatttctttgtattgccaaatattattccattacatggatatatcacattttatccattcatccattgatggacatttgggctgtttccactttgtggctgttatgaataatgctgctgtgaacattcatgcacaagttcttgggtatgtgtggatcataaatttcttcaccagtcacatcaaaatgcgtcatctttaataatttgatgtatactacaagtatatcgaagatacaaggtgttttagaatcccactccactggcctgaatggccatatctcagctatttccatataatcctgctcttgtcagtttgtacgagtaagcaatgctcagtctcaagtacaaaaattgtggacattactccctccttttgagaatctctcttctcccacatcctctttatagactttatagactttgaattgctcaaagtctaattctttttttttttttctattttttatttttgagaccgtgccttgctctgttggcccaggatggagggcagtagtgcaatcatggctcactgcagccttgacatcttgggctcaagcaatcctcccaccttagcttcctgggtagctgagactgcaggcgtgtaccaccacacctggctaattttttattttgtggagatggggtctcactatgttgccggggctggttcaaactcctgggcccaagcaagcctcccacctcagcctcccgcctcagcctcccaaagtgctgggattacagatgtgagccactgcacccaatcaaagtccaactcttattccacttcttctatgaggttcctctgcttttccagcctcttctgaattcccatagcagcatctgccccattcacttgggcattagccacctgcagtcttggatggcttcttcaccatttcatgtgtctgcatcttatttctgcaaacataggactctagagggcaaggatcaagtcttaccattcttttctgccttccttccctcaactccaactatgcaagggtagagaatgaattaaaaaagacatagcacaataatacacaataagttaatattgaatgagtggatgaatgctatagctctatgatattgatgttctcagtgcatagtaagatgggaatggtttgcaccaaccagtgaggaaatgacgagtgtaattaattaaaccaggtgcagctctgaaattgtgaggtgcttatttaaaagttgctgacttgttggctgggcacggtggctcacgcctgtaatcccagcactttgggaggctgaggtgggcggatcacaaggtcaggagatcgagaccatcctggctaacacagtgaaaccctgtctctactaaaaatacaaaaaaaattagctgggcatcgtggcgggtgcctgtagtcccagctactcgggaggctgaggcgggagaatggcatgaacctgggaggcggagcttgcagtgagctgagatcgccccactgcactccagcccagacaacagagcgagactccatctcaaaaaaaaaaaaaaaaaaaaagtgctgacttgtcacagtaaatgctgaaaggcattctatttagaaataatcttgtctgtgtatcatagtttctttatttcttcttgttctcatttgcaaggacatattcagatatattgtcttgaaaataggattctttcaacttcttctcttttatttccaagttcagatcataatttagtgactgtattattatcagagttattatgtctgtgatggccatatccgaaatctctgtgacttttcaggcaaggttagttatttgaatgaaccccgcaaatgaactttctcatgttaatctctaaagccaaatggaaacaaacaaacaacaaatttcaggaaatcagacacataaaggtacaataatttgaaacagaacaaagatattttagtttttctcactcttggcaatgaaaatttctctataaaatctgctcttcagacatttccccatggatgacagaattaagcaaatcatcccagtttgttctttatgagctgcttatgaaacattccttggaaataattctgcctaaataaaattactctattaattcatagccttaatttttgtgtgatgttgaaaagaactaaggaataggacggtctcctttggtagtaataaaccatgccactctggtttagaacgaggagcttgctgaaggttggagaggcagagtgtacattatagtgaagctgcggttgttgcttcagggacacactgataaccctggtcacagttgcaagaggtagatggcagatcccttccacaggtatgtgtccttgtatccccatggtcattcatgttaagatgggaggcatctgggtgacttccttaagttcttactgtgaagatatgttgacatatttgttcaaaagacagatagaatttgttgtaaagacatctgagctttgtaaattaatcctggatatatctattgatggccttcatgtggggtgaacacgtttgtcagagtgttaccaaaggactgtttacagatgcattcttttctgagcatctaaatgaaaagttcacaagtacctatggaacttccaacactgtgctagagatgataactcttaaaagagtcatagaaatagaaaatattcctagtagaaaaattcttagagtgaaatcaggaggagatctgtgcatttgaaaccaccaggagggagcatagagtaagaggatggactttgtgtttgtaaaaagaactggacttacaatgctttccgtttactaactgtttggatttggacaattgtgctccacacaaattctttcccttaattttcacaatgaccttatgatgtagatatttttgtcacacattttctaggcataaaaaaagtcatatgattcgtccagggtcatacagctagaagacaagccaggatttgaacccaagtgtcctactctagactgtcttcctaaaacagggaagggaggagttggagggcttgaaaggagagcatggcaggctgaatgaggaaacagaacaagagaaggagcaaacaaggtacgggcacacgagtaaggatggggacctgctggtgtcggacatggccgtgggacccacaccagcaggtattggacagatcccgtaggcaggagggagcttcctttgcactggcagaatcctgagaacatgttggtctcacattactgcctccatttcctttttgaattcctactgatgatgactgagccacttcatattcattttctgtgtcaggataaaatcgctcatctcagctcagtcatccctaattttcttaggtttatgacagaaattgcactcctaataccccacctagtattcagtttcctctccgtaaacatatacccagtcttcttttctccacaagtcattctgacttattcatctattcattcagcccagtctgaacgcttgaagaccgtgctagcaaagcaatgagcaaagaaagctagaaaccggttttcatccttctcacatgattccctgaaattcacccctcttcccaggaatataagtgtttcaaatgtttttgagtaacggtgccagaacgtgaatcaattacatcataaaacaggcttttagttcagctgacattttttcccctgtcacaatcctttctcgatgaaggaatcagggcgttgatttgccttctggtgcattcgctcctgtttccttctggggcagcccattaagttctggactagctgcttctcgggtcccattatttggagcctctagcgttctaaggcatattattagttttaaatatacctcagtcatatttacattttctttgcgcattccttttaaccatctgggaaacaggatccattctgccacccttcctggagatcacctctctacagaggcggagtatggtaaagcgacagagaaagaggagacccccagtaagagggaccttcagagtcttttctagattgtgcatggctctgtctgtctgtcttagagctatcaaagagtagtctgtattttgcagaaataataaccctcagaatcctatttctagctgtctcttcaaaatcattactccccattgtaggctttctatgagccgtggactgtttcagggctgctttgtatgttatttatacatctcgtaggtaggacgtggctgattccattctgagtggatggtttagatcgttgtttactctgattagttgatatttgtatcacagtagttattaaataatgtgaatagtgcccttcactattctgaataccctagatggtgtatatacatatatcatttaattctcaaaagagtagttgaggtaggtgttattatccctgttttacagttgaggaaactgaggcacagagaaggtaaatgacacacagtctatggcagaattgatgttcatacccagagcttccaggccattcaattatgccttgctactttccaagccctacaaagccctttttcagttctcagtatgcctaaggaatttttttgcagctttgtttactagaaagttctctcagaaagcctccttcttgaagaccagaggaaggaggtttaatcagcttccttgtgcagaggactccagcttcctcgttagtcttttatgttaggaagaaacagaggtgcatctgtggcagaagccaactgctgcagtctgcaggcatctttcaagatgcctttccttgaagcctgtgggccggcctctgtgatgggagctaagctgcagtgggagctaagctttctttccatgtctccccttgcctggacctcatcttattgccctgacttatgatatatctcattctcttaaactatcaggttccatcactcaaaggagcacaccgaaacctattctcactgatctttctgatgctgctggctcctttaaattcttagcatccttaaaagaaattggaaaatgtggtcgtctggggctgtgtgctggctctggagggcttcctcagtcaatgtcagccatctagcacttgagtcatcagagatcgattagagggggaattgggtaggggaaagaagagggtgacatttggttattagttgtttttttttttaatttttagaaattcaggtgagattcacaaaccatgcaattaaccattttaaaatgaacagttcaggcaggatgcagtggcccatgcttgtaatcctagcactttgggaggctgaggtgggtggatcacttgaggtcagtagttcaagactagtctggccaacatggcgaaaccccgtctctactgaaaatacaaaaattagcctgtagtcccaggtactcgggaggctgaggcaggagaattgcttgaacccaggtgacggaggctgcagggaggtgaaattgtgccactgcactccagcctccagccagggtgacagagcaagactccgtctcaaaaaaataaataaataaatgaacaattcagtggcatttagtacatttagaatattgtctgaccaccacctctatctagttcggaagcattttcatcactccaaaataaaaccctgtgcccattaagcagttactgcccactcccttctctttctactcttggcaatcaccaatctgctttctgtttctgtagatttacttattttggatatttcacataaatgaaatcatacaatatgtgaccttttagtcagacattcatgtagtgtaatgtttcaaggttcatccatgtcagagtatgtattagtacttcattccttttttatgactgaataatattccatttatggttagatagcccacattcatctgctgatgagcatctaggtttgttcaaccttttggtgattgtgaatagtgctgctgggaacattcatggacaagtattcgtttgagttcctgttttcagttattttggggatatacctaggagtcaagtggctgggacatatggttgttctctgtttaactttttgtgaaactgccagaagactttccatagggcctgaagcatgggccattagttttgatagagatctttagagcagacatcaatgaagtcaggaaaggacatatgactgtctctatagaaactctgtgcatcttggaacaaggctaaaaatgtacattaggatgcctttattgagaaataaaaatatggctctgtatgtgtaggggcagaggttttttttaatgtctccccaggtccatctcccactaggatgatggaaataatctcttctttcatctctatctctctggccttgtccctttctttccagtccttctcttggggtggtttcctctcagaagactattttctatttttattttattttttatttatttattttttgagatggagtcttgctctgttgcccaggctggaatgccatctcagctcactgcaacctccacctcccgggttcaagtgattatcttgcctcagcctcccaagtagctggggctacaggcgcgtgccaccatgccaggctaatttttgtatttttagtagaaacagagtttctccatgttggccatgttggtctcgaactcctgaccttaagtgatccaccgcctcagcctcccaaagtgccagtattacaggtgtgagctaccgcacctggccagaatactgtctctttaaaatgcaaatctgatcatgttatttacctatatgaaacccttcagtagtcctccatggccttcagaacccattgcagatgcctttccttggcacatcaggaccttgacatcatggcccttgctaggacctcagcctcggcttctccctctttctcacagccatccttgcatatcagccacatcacctacttggtaggtccctgaacggaccatgctgttttataccttcttgcctttgcatatgtgtcttcttttggctaccgaactaactgttccatctccttcaaggcctgactcaacatcacatcctgccagaagcctctcataattccctagtctgaacttttggtactttcctctgcactttaactccttgtttgcttctctgtatcttttactaggctccgtaagggcagggatgcttactctgtttagtccatcatgtgtctgaaatacctgcagccttgcttggcaaaaagaaactcacaaagtagttgttgactgaactgagtgtcagtcctcttaggtcaggatggcacttttttttttttgttacctatttattttgatacctatttgaaagcaataggtatcatacgtgttaattgaattaaagtatggaaggaaagaggaagggacaaagaaggaggaagtcagggagaaaaggtaggaagagaagaagaggaaagaagaaagcaggtcaggcaaagaaaaagaccaaaaaccaaaaaagagagcaagcagaaagaggtaggggaatgaatgaaactgggaaagacaggaagtagataccaatgacatctacctttaaacaaatgtactatcattcaatttattctctagatctcataattactacattaaactgtgtgcttgcagagtagaagggtggaggagagaagctggagaagtggagggcttaaatcccaggaatgaatgcctcccagtcccaccttattccacttacactctgtactgtggccaggggcaggggaactagtagtttcaaaatacccaagggtacagggcacttggcaggaactgctgcttccattacatctgtcattttagactttttttctttttttttttgacaggatctcactctgttgcccaggctggagtgcagtggcacgatcttggctcactgcagcctggacttgctaggctcagatgattctcccacctcagcttcctgagtagctgggactacaggcatgcatcactatgcctggctaatttttatattttttatagagacaggagtctccctgtgttgcccaggctggtctcaaactcctgggctcaaccaatccaccctccttggcctccaaagtgttgggattacaggcatgaaccactgcacctggtctggactgtttttaggaccttcaggtcagagcacagaaagggacattcaagactgaagtgggagtggctgtcttctgccttttgcttacctgttccaggttatataatttgcacctttgctagtgatgccactcactgccttttgattgcagctaaactgcaaggctcatttaggaaatgctggctttggggtaggagagctttttaaatgtagatctctaagaaaaaaatgacacccggtttgttcctagtttctcatgagagattttaaggcaaccaatccaaatgcaataaatacaccaatgacactatcatccatacccacattgccttatgcatgccaaaaactgaaagcccaagaaagccgccaagtgagtcattggcttcttgaaggcctgagctcctcagtggagcaccagaatgccctcgcctacctccggcagcctcagccaagactcctcagtatgccatttctgcactctggtttgctttctcttccctttttaagctactgctgcttgttttttataaaccagggacttattagccaacaaatagacattctcataatagtgagtgaaatctgatcttatctctctttctgctgggctccggggcaggtgcctgcaggaagtgctgggtggtctcagaagaggcaagtggaactggcagtgtccattcccaaatagaagccttgctgccagacccggacgacctcgcagctttttgcaaatgaaagaaccttctccctaccaagggagccgtgcagtaaacgtttctggcagcgcttttgaaaagtgcatagacattctcaggccacttgggacctgtttctgaagttacttattctatgtgtgatgcggaattcttatagcagcgactcttaaagtgtggtccacaggccactctgcaatagaatcccgtcccccactccccctgcctagggaaactggttaggaatgcagtttctagaactccactcagaatccgctaggggcagcagggagcagtatatttaataagtaccccacgtgattcttctttgccccctaagttccagaaccactgttttgcaggtttacagaacagcagatcttgaaaggcaagcaagccctggacatcttctctttccatcttctgttgcctgcatagccccatccctgttgtttcacctgggtgaccctgtgttacaggatgacgctaccagccatgaagtgccttctgcaggctgtggagggctctccttctggggatccggtttaatccattcttttcatggggttgctttttctgaggactgctcttttttttcacattgaccatacacagaatgtttttcatctggtgtctctccttggggaattggactgaaatcaaatttcaggctgtgagcacatgtcacaccaggatttatggcacaggacaccagaatttactcagattttgttttctaaaggactcagaatcaccgtccttcagagtcataatattccttccataaggatctattgaagagattgatgaaattgtattgatgaaatttcatcactgaaatttgtatgaaatttgatgaaattataagagagaaacagcttatatccctgggacggtgttttcttttttctttctctcctccccatgggacatgctggccctgctttccaccccattgtaccaggtgccttgtgccctgctggagccctggggtgctcaggacacaccctgaagctctgatctttctctgctggttgtccatcagaatgtgtctgtcatgtggctcacgttctcagaattttgctaaattgatgatctcattatatattgttaaggaatgctaatggtttaaagtgcatccaacagccttctgataacatttgcatctcagtaacaacctttagtggagtgagtaatgtaggattttgaggccccttagggtgactagccatcagggtttgcctgggactgtcctgtgtcctgggaaacactgaagtcccaggcaaaccaggaaggttggtcactgaagcctcattgggagcctttttttttttttgcgacagagttttactcttgttgcccgggctggagtgcaatggcgcaatcttggctcactgcaacctccacctcccgggttcaagtgattctcctgcctcagccttctgagtggctgggattacagccacccaccaccatgcctggctaatttttgtatttttagtagagacagggtttcgccatgttggccaggctggtcttgaactcctgacctcatgtgatctaccagccttcgcctcccaaagtgctaggattacagccgtgagccaccgcacctggccttgggaggcattttattataataataataataacaacaacaatagtagcagcagcagtagtaataataatagctaacatttatgtagtgctttgtgccagtgctgttctaacttctttgtatatacacacacgcgcacacacacatgtaattctttttttttttttttttaaagacagggtcatcttgctccatcacacaggctgaagtgcaataatcttagctcactgcagccttgaactcctgggctcagctcccgcctcctaagtagctatgactacaggcgcgtactattgctactttacatatattaactcatttgttcctctcaacaaccctacgggctatgtactaacattatcgccattttaaatttaaatttaaatttatttatttgaaacagggtttcactctgtcacctaggctggagtgtggtggtgcaatcacagctcactggagcctctacttccagggaccaggtgatcctcccacctcagcctcctgagtagctatgactatggcacacaccaccacacccagctaatctttataatttttgtagagacaaggtttcaccaccttgaactcccgggctcaagcagtccccacctcagcctctcaaagtgctgggattacaggcatgagccatcatgcccggcctatccccattgttaagatgaggaaacagaaatagagacacccctgggcaagtgcaggcaggagaggaggatttctggaatttctaaagttggcaggagtctgcctgttctacctgtgtgtaaggctgctgtgcaagaggtagtcctgggataaaactatcttcaaaacctgagtattttccactatcccagatagctttccttttgatgaactttttgtttgtttggaaatcattttaacaaacaaatacattgagacaccgagtgtctcagtcacttattgggactaagttcaatatttactggaagttctactgagaacagagaaacccagactgcaagcgaagcttacacccctaccccatctcctgtgaatagctaatgaggaaatcctgacattttatgttatgttaatgtattatgccattttcttcctattcttattaatattggcccaatctagaccctattgtctcacaactggattactgctacagcctcatttttgacttcctgggttctagtcctcctcctcctcttctttccaagaagacagtttctgctagaactgtcttcagttgtaactttttgttgttgaaacagagtcttgctctgtcacccagcctggagtgctgtggcaggatcttggctcactgcaacctccgtgtgccgggttcaagcaattcttctgcctcaccctcctgagtatctgggattacaggcgtgtgccatgacacctggctaatttttatattttaagttgagatggagtttctccatgttggccaggctggtctcgaactcctgacctcaggtgatctgcctgccttggcctcctcaagtgctgggattataggtgtaagccaccacacccggccttcagttgtaacttttatcatgtctctctcctgtttaatacctatactctctttttcttccagatcagacccaaataactcaagactaattttttctgtctactgtattctcctgtatttctcatcataggagctcagcactgtaaaggactttagaaagtacaatcccaggccggacgtggtggcttatgcctgtaatcccagcgctttgggaggctgaggtgggaggatcacttgaggccaggaatttgagacaagcctgggcaacaaagcgaaactccatctctacaaaaaaagttaaaaacaaaattagccaggtgtggtggcgtgtgcttgttgtgtcatctcagctacttaggagactgaggcaggaggataacatgagtccaggtgttcgaagctatagtgagctgtggtcactccattgcactccagcctgggcaacagaacaagaccctttctctaaaaaaaaaaaaaaaaaagaaagaaagtataatcctgtatccgataatcagtgttccacacaaaccatcattcaggggcaatttttaacacctccaatgacaggcaacttatggaaacacatttcatttacacattttgtcagaaagttctttcttgaatgtaggtaaaattggagtctctaataattgttcatcagcctttgttctgtccttttttcatctgccagcctctgaatatttgcataaggctatcatgtgttgtcttctccaaatgatgcataatcagtttcttcaaatgatcatcaaaaatcctttaccctcctggctattttctggaggctttcccagttggtggagctcctcctaatatgaggcacccagaactggacgaaccccttattagcccttggaagtgggatgacatgattaatattagtcagttaaaaccacattccctttcaatgaatatttgtactgcttttaagccatgcctttcatgactgtacttggatagttttttttttcttccagaaataagtgcattaatctgtacttactccatcttatccaatctggccaacattttagccagaagacctctttatagattttccatctgtcatcttatgtgtgagtgttctcttccagtgtcatggtcaaccctaaatttgatcatggattccatttatgttttcagcaaagcttgtgataatgacaatttgggcagaacacatttcagaaccagcagcactattgggggaaccctcccccaatatttcaacgtaggttctttctattttccataagtgtcagctggctgagaaataaagagaaagagtacaaagagaggaattttacagctgggccgccggaggtgacatcacatatcagtaggaccgtgatgcccacctaagcctcaaaccagcaagttttttattaagggtttcaaaaggggagggggtgtaataacagagagtaggtacaaagatctcatgcttcaaagggcaaaaagcagaacaaagatcacatgcttctaagggaataggacaaagggcaaaaacagaactactgataagggtccaacaaagatcacaaggcaaagggaaaaagcagaactactgataagggtctatgttcagcagcgcacatattgtcttgataaatatcttaaacaacagaaaacagggttcgagagcagagaaccggtctgaccataaatttaccagggcagagtttttcccaaccctattaagcctgagagtactgcaggagatcatggcatatctcagtccttatctcaaccgcataggacagacattcctagagcggccgtttatagacctccccccaggaatgaattcctttcccatggtattaatattaatattccttgctaggaaaagaatttagcaatatcttccataattgcacgtccatttataggctctctgcaagaagaaaaatatggctctttttgccggaccctgcaggcagtcagaccttatggttgtcttccttcgttccctaaaaatcgctgttattttgttctttttcaaggtgcactgatttcatattgttcaaacacacatgttttacaatcaatttgtacagttaacacaattatcacagtggtcctgaggtgatgtacatcctcagcttacgaagacaacaggattaggagattaaaataagacaggcataagaaattataaaagtattatttgggaacggataaatgtccatattaaaatgaaatcttcacaatttatgttcctctgccacggctccagccagtccctccatttggggtccctgacttcctgcaacacagcacagttctagataactatggatctagatctatctagatagcctggtatttgttacagtggtaggcatcctgtgattgttcaggcactggagaatctatctgttcacacagtttgtgttttaccatcttgtgaatgactctgttaaatgtcttgatgagttctagatagcatttcttatagctgacttagaaaagaagagcattgaaatcatggtggagtccttgctgcctagcatcccctccatgttagggttactttggggccttttttcatcctttctgtctaaaggctctctttttttcattttttatttacaatcatagtattatcttccatggccagaacagctgtatctccttcaagaagccagcactcactcctttccattaattctaggcattaatttttggtacataacacaatttagcacataaccttaaggtgctttgcattgtttgtacattacttggtattatgtgtatgtccaggatgaaatgcacacttggtaaatacctgttggatgaatgaaggtaagtcttatcatcttgatcagaccatagcaataagattcttgaggggagatgctagtcttacaattctttttttttttcccttttcaaaaattgagacgaagttgggcacggtggctcatgcctgtaatcccagcactttgggaggctgaggtaggcggatcacctgaggtcaggagttcaagaccagcctggtcaacatggtgaaaccctgtctctactaaaaatacaaaaattagccaggcatggtggcaggcatctgtaatcccagctactcgggttgctgaggcaggagaattgcttgaacccaggaggctgaagttgcagtaagccaagatcacaccactacatttcagcctggacgacagagcgagacgcaagctaaaaaaaaaaaaaaaaaaaaaaaaattaaccattttaaactgaacaattcagtgcttataatttaaacttttacacaatgcatgacaactggacagaagatgctcaaataggcatttgctaacaattacctgatggttcctccatagcatgctgtgactagatagtaactaataactaattacccagatcctttgaaatggatttataaacatagccagttttttacttttagaaactctaagttgtagactctaggaagccttattctgaaagtattagacactcccatgccatagagacagagagttcttctggatgaggaagtagcacttagaaggtacattcccatttactacctgcaaggaaatgtcaaaaatgaacccagccagaccaggactgagttggacaagagatactctgtttcggctgttttcctagtctatttggacagcctaaaagaagagcactatagccctggtgacaatatattcatgcatctctattccaagatcctttataatcataccaccatttggcaaaggtatgtttgcccaccatagacagttaatatcacataaccctcccttgtattccttaatgccttatagttgacaaaagatcttcacctcaaagattacccccattttatacatgaagaaattgaagttccgataggataaatttcttgcccagagcccaactgttagtatatgttgaacctgagacttaaattcaatcctgaacctcccaagtctgtggatgtcctgatgaaactactagcactcagatgtgcccaagccatgaggggtcagaaatatggcttcctactccagcatactgttttggagaagcagttttagcaacaattttctatttcctcaacacttaaccctttcctgcctttttacctttgctcatgtcatttctctcttctggtaccacttacccattttctgtataaatcctactgaagttcagaggttcctctttgggggagattctagaaattcaaggaggctcctgtgtcatgctgtttggtttgaagttagcaccttgtacctcatgtctccagtatatagagtaaggactcagaacatgatctgtttataaatgttacattaactagaaagagccatacctcttaagaaaacttgattccattattattaatctgctttttgcttgtgcacatatatttatgttaacacttgccaatcatgtagataaactaagaatcattatttgggcaaattttattaggctagaacaatttttttagattgatttcaaaactaacgagtaaaatttagaaattaggcagatttttggatataaaattttatatacttctcagccaggctcttataaaagccaaagaggctaggtttttttttctttaagaaatatgaaatcatttttttccatatttgtttcttaattccttccatttgtgtagcttttgtttttgctttcccaagaactttcataacagggtgaatttcaccattgtctagattaatcagttttttgggtagtgtggggtgctagtaaataagtgccttgggtcactgcaaagagaggggtattcacatggagcagtttggaaggcactcagcaaattgttgggtcatgggtagtcactttggtgggctcattccagcatgcagtgcccgtaactatgggtgcaagttcctcacctgccagagagaagagcacagcccagagacagagggagattacagaaatggtcacgggtgatgccttgtctggggacttccagaccttttcttttaaggaaagtccttggccattttcatttattttgcatggaccctcaggtctgatccccttgtctggggcctcctgcaaacctcttccaaggtcaggccttgtttcacctccactcctcctgactctcaatggtaggtgactgtcctctgctttgctctttgaacatcttcctgttgattttcaagggcgctttattctctcaaccaaacccactgctttaaaacaagcattttggctttcaaagctgttgttcgtggtgaacaaaaacacatggtgtataaaaacacaatcattttggaagtcaaaactgagggtagactcttttcttctccctgccttcctgctttttggatgccagtaataattcctcttgaagcactgtgggtgctgctgactgaggaggagcatctccaacaaagaagggcaaaaaagaaaagccaaaaggttaatgtcttgcaacaatatccactagctttttttgattctcataggagtacacagggaaggtattatatctgcagatagagaaaggagttgtgagatctgacagaggtcccagagccaacacggcagagctgatagaacttaaatttcctgattcccaatccatctctcctttcaacagaaatccatgccagttcgaatccttgaacctttccattgtatttacaacaaaatcagacatctgatgctgtgtttgcaactatgttaccatcccttccccccatgctccaaaaacaagagaattgctgattattcttatttttgtgtattgggggtaggagggttggtgaggagacgaagaatagcagtttagcctttctcatatttcaaatgactcattggttttttaaaaaaatcttgtattctcgatgacattctgacatccaggtaaaactttgaaatgacacgaaaggtcttacttacagaaatccagcctaggtgaaagtagaaatgaatgactttccaagcaccaatgataccctgtgctcatctgtgtgcaagtggagcagggtccattccttcctgacaccacctctacacccagatacaacactactctggaaagacacagatgggcaatggaaactttgattggggagggtgtcatataactcgtcagaggctaagtaagtaggtccaagatttcacaatgttctatttcatattcattctaaatagcagatgtaaatagctatattcccatgtctgctggacagagttgacatagttggccaggtggctctattagcacattacactttgagagaagacctctggcaaggtttttactctccttattaactaacagttgctgagaatgtgctacagtttctttaagtcaaaagcagtgtgtttattattcaccatttctggtacatgaaagactcaggggacatgatagctgtcttcagctctttgaataattgtcatgtgtaaagggtgtctagcttattatgtgggaactcaagatattgggttaggaccaatggatagaagtcttagggaggcagatttttgtaaaatataagaataaaatttcagaacgttctgaaaatggaatgggtgggttcctcagccctgcagatgttccagcaaaagctggaagaccacttggcttttattatatagatggaattcagttctttaattggcagatgaactctctaaagtgccctctaaccttgaaattagtgatcatgtgtgccaattagaagtcggactttggaatttgaccattacattggtggccatttagcagccatcaaatatggcaccatgacatgagatttcattgttccattgcaaatctgcaagtcaccacttatccactgtctacagaaatggggagcatgaatgacccccagcagaacattccccagattgtagatgtagatgtgatgcactggttccttagaaaccttgccagctttttctgatttctgagctggtaccattccagaatatcctgtttatccataatatgcaaaagcacatgtcaaatataaataaactgagaagggcttccttctttttgggaggccttggcatctcagatccctccctttatctccaggtagccaggaagtaatctctgagttaatagctgaaaaaaagcttaatataatgcctctcccagagttctttgcattttcatagtgtaaggcagcattaaatgaaactctaacacttaaaaagaatacttcaccaatggtagagcttgaccctgggactggcagaaagagatttgatggagagggggattggaaaggagaagagccttcctggcatatagttattacacccagccacttacaaggcctgctcggataggaattcattgaaatgggttaatttcagtggtttccgatgagaaaacaatgaatatggagtggtacttatttgttgctgaaactgggttgaaatgtaatttgtgccttttccatgactactgaatgtctcctctgagaaggcctctctgagtcctacaaagaaaacttattcagtgagacgcataaaaataccaaatacattctcatgtaatggccaccataaatcaactaaagcatcttcaatgatttatgctttgagagcccagagagcatttataatcttgaaacataggagggtttttcgaaggtttgtagtggcagttctggttcatgttagacagaatcatagtggtctgcagggagagaatctcatttttactgatgatgtaataggcattttgttttcctaatgagaggtggtccgggccctagggcattcccaaccacgtattactgggagagaaagatgaggaggaggctttcacctttgtagacctgctccctgcaaggctgccttttatccctgaaggaagcaggtgataggcaaatgaccaaggaattaaataccacaggacatccgaggcacagaacacgttcatacacagagctgaaattaaacaacatgatttcattttcagcaatcattttcacaacatgacacagccttttactattctttgtagggtgggaaccattaaagcaaagttatttgtacaagatttctttggagttctgactaccatttcatgcttctttggccaaggtctttgactgagattccctaaggaagtggcaaagaagcagaatgtgctatgatctctgaatgttcctgggagcctaaacatgatctttccttgcaagaaagtcacagttctctgtgtaataaacagagttggctgctccccagaattctccagtcaaggattactatctgcgagctgtttgaacttctgctccttgggaaattaaggtgggctttctggcactctgcgttatgcaaaagctgtttacatttctgtttcaaacagcacagaaaaatccatgaattgcactttacaactgaaatttgttatagactgagttgcttagttgaccaaatcttgggaatcttaaagttgatatagttttgtttgttagttttgtttttgacggctggtttaagacttccttcattcaccagcacctgaaaactaaatctatactagtttgggaatttgaaaactgggtagattcagttataaggaaaattataacaaaaggatttagtcttttggaaagcaatccagatctcctttgtctaggcattttatattccttgaagggaaagctttttgaaaagttgatacttcagttgaataaaagaacacacccgatcttgaagaatatctaatagccttatcaatgctatttcttcaaatgttatcagaagtctcatgtttatattgacatttcatgttttgataatttgtagtagaatgtaaacacagaataacttgaattttcttgagtgagttcagcatctgcattcaagtaaagtggatttctatccgcatatggatttgtctgtaactactgtaatgattgtttctaaaaatttagttatagtaacacagtgtgcttcgctaggttcagataaccaggttgtatttaggctgtttttgtgttaaaaataggaaagactacacaggctaaaaatcaaagcctaaatttcacatattcagagacaacatgataatttccatgaattcggcctcatgctaagggctttgatgcattgtctcacttttactcaagaaatcctttgtggtatataagtgtaataggagttgccttattacgaatgaagaaactgaggcttagaaaattagtcagatatccaaaggcaaagttaataagtagcagtcaaggatttaaatcaaggtctctgattccaaaacctgtcactcttcagtttaagaagcttccttccatctgcacaagaaagccttgtttgaagctgtataatactatgcaagtgagtcattattttgaagtactaatggttctaagagttctaccttagttaatcagccagtcaacagacatttatttttcactcacttgtgatgttccaggtgagttctaggaaggtacacagatctctgtattaactatacaaagaaaaacatcactgctacctttacttggaaagtgtgaagcaaatatgtgtggcatattcatagtggatgtgtgtgtttagtcataacatgaattaatcaacagttaatcaatgcatattattgaatttctgtatagaatgtggatcatagaaatggtaaataaggattttttcttttttttgagatggagtctcactctgttgccaggctggagtgcagtggtgcgatctcggcttactgcaacctccgcctcccgggttcaagcagttctcttgcctcagcctcccaagtagctgggactacaggtgtgcaccaccatgcccagctaatttgtgtatttttagtagagacggggtttcaccatgttggcaaggatggtctccatctcttgatctcgtgatccgcccacctcggcctcccaaagtgccgggattacaggcatgagccaccgtgcccagccgtaaataagaatttttaactgagtctcacgtctgtcattcttcagttctggactttagctgagttacttatgtctttgaacctttgtaaagtggaatgagatgaacgagacaatgctgttaagcacctagaacagtatctggtaggtggttggctgaaaaataaagcactctgccatactttgcccacttcacctgtgtatccaattggatgtgtatctgtctgtaggcatagcctcccctgaactctcactggcctctaaatctgaccaagcggcgacattcacttccttggacatttttacatttcccaagtttacaaagtttacatgacatagaaagagagcagaatagtcttggtttcacataggtaacactccctttcccttttgtcccctgtgatcacactggtggagacagtgacctcaagttcttattattcaacctagaaagcagctagctggtctttccctcagggccggaaaacttttctgtctgcattttgcaaactttatatagttcagctattccttccttctcaggcaccttataactctcttcagagtaggacaggagtgtcgtcagggtgttgtcctcctcaggcttctgattctatagccatgagactgcagatttcatattccacagcagtgcctgctttaatgaatttgatcactgaaattttatatattgagttgctatgtcttaggaatagctgccttagaaaatcttatccatcatttaaaaaattgcttcaatagtttctttaatgtgaccctacaattttttttaaaaccctcaaaatatatggagtttgatatcaagtgccagtacaacttgattaaagaatgaaaatattgcaaaactgtgctttactgaccatggcaccaccttctgggcctgtgagggggagcctgagtagaagtagtagggtctggtggttcacacagaagacttgatgttgctcagacccagctttgagtccaggcttctagttgtgtgatcttgaatgcattgcttggtctttttgagccacagtttttctatctgttacaagagggatgacagttacaataaaaccaacaccctcaaaggttgtggtgaggcatatataaaataatgcatgtacagctcaatgttgattatttagtaaataatcaaaatactagctcattgtaaagtgagacatggtcaggatgccttactgtcttttgaagagatggcatgtgtccacagaacaagcagagaatatcctgttaataacatgctaaattatgtaaaatatctaataaggccaacatcgagacactgagatttctagtttaccttattggatactattaggttggtgcaaaagtaattatggtttttgctttttttttgtttttaatggcaaaaaccacaattacttttgcaccagcctaatatatcagtttcttggagctgccataacaaagtaccaccaactgggtggttttgaaaacagaaatttattgtctcacagttctgaaagctacaagtccaaaatcaaggtgttggcagggccatgttccttctaaagcctgcaagggaaggagcctgcctttgttcttagagcttctcatagcccaggtattcttggcttgtggcagcataatggtgttctttctgtgccactttacattctcttccctctagtgtctgtccctgtgtccaaattccccaaccccccaccttttttttttttttttttttagatccagtctctgttgcccaggctggagtgcaatggtgcaatctcagctcactgcaacctccgcctcccaggttcaagcgattcttgtgcctcagcctcctaagtggctgaaattatagttgcacgccaccacgctaatttttgtagttttagtagagacattttgtcatgttggccaggcgggtcaaatttccccttttaatagacaccaatactggtttagagcccaccccaatgactgcatttcaacactgattatctttatagggaccctgtttccaaatcagatcacatctgagatactggaggttaggacttcaacatatctttttcaggggacataattcaactcatatcagatatgtgttctctagcattgtctataacctcgagctccactggtgaagctccttccctcttgtggggtatatcgactgctattaactggatatttcagagtttatgggtcatgtttcatctgtagccttgagatctggtaaaaatttgtcatcctggcacagattctttcttccaagatgtgttactttctcagtggcccattttactgagttcccccactcttataatttgtaattttagttatattttaaaatatatattttattacaatttataaaagttatttaaaatgtttttatattttatgtgcttattgtaacaactcagtgatatataaaagcaaaagttagctgtctctccccagcttccttccatttttatcttctccaatattaaagtcaacattaacagcctggtgtctctccttctgtatgtttcttcatgctcaatcatgtgcaaatacctcttgtcatatttttggttgtttatttttacagaaaatggtattgtgtcatattcatacttagcttgcttccacatcaatagagggagagttatctctctttaatagttgcataatatactggtatactatagttttttagtcgttaacttactaatggaaatttagattgccatttttccattttgagctgtatgaaatgttgagaagaggtagaactcatcttttttgtttgcttactgtgcaacttgaacaatattatttttaaagaaaaaaaatcctgaaatgtcagttcttaacagttacaggaatatctagaaggatttcctagagtgatgaaagaggtcacccccccattgccacttggttgccttatgccttcataaaaatgacagagagttcctgggaccaagggggagcttccaaatgtgctttgggagcttctttgagcctgtaatttaatgatgtctgaatgtcatgaatttgatgttgccatgttccttttgtgagcctgaaagtaagcctttatgtgtcacatactacacatgctgttgccaactagactggataagcaggccattcaggaaaaataattagaacacagtaaacagaccctggattttaaagctaagcttaactaaatgttacttgccactttagggcaacttcggggcttagtttgtctatagaaatatcagtaataggcttccagatactgtattccagtgactagttagcattactcatataaactggttctacttttggagcaagcacaggacagattccttagcaattcttgatcaatagccagctggtatactgcagtgacctgggataacctgagaattcaaccagaggaaatgggtttataggtttatatattttaactgatgaaacagaaaatgggggaagagggagtatgccttacttagatatggttctggcatgttttgtgttttctgctttttaaaagatcatgataaaaacaaacttcaaatagtgtagaaggatatgaactatcaagtaaagatctagagtcccataattctaattcccataagtagttgataacaaccacttcctatcttcatgatgtattaagtgggcaaatgaatgttgtagaatattatagagagtattatgctacatatattacataatgaactatatgtaaatattacatatatactgtatgtaaatatatgcatgtacatatacatacatatgtaaaaataaatgggtttaaaaaataaaggagtatagagtgttctggaacttttccttttcagtaaacaatattacctttaacccatttccatatcagtacttctagatctaccccattgttatcagcttctgcctagcaatcctctgctgggttgtgtcataatatttgtttcaccaatcccctactaatgagcaggtatgcagttctcagtgctttgcaattacaaccaatattgcagataacatccttacacaactatctttgtgcagtcatgtgtattaaattttatattgacaaattcattcatgatttttaagacttcaaggatttggatcatgctttaatactccccatatcaaaaaattttagttttatatactttattctgacactattttagtttaatttttttaccctttaagtctttaggagaataacaaagtaggaatccaccctaactttttcgccccaaaagccagccagcttttgcaacatctatcattaatctgtcatctccttatcccacttcagttttgaagagcttcatttaccatattcaaacacccatatatgacacgtagaactttctctgaactctgtttagggttattttgtctgtttctgggttagtattaaactgtttcaattactgtagctttataatacattttcatatttggcagggttagttctcccattcacttattttttcctgacagttttcctggtctttatcacgaatttatttttctgtataaatctgtgtatgattttgtgaaaatgttccccaaatcttgtttgtattttgattatgattatattaaatttaatatgggaaagattatatttttattatattgagtcttctcaccctagaacaaagcatgaccttctattcaattattttatgattatcaggggagatttgtttttcttcatatagagcctggaaatttctccccaagtattctacatattttgtttttatcctaaatggttgctgtttttttctctttgtcctctgtcaggttattagttggataaaaggaaactattagttttaacatattaatgtagtaatcaatttatgcagttcttagtttttttagttgatgctcttggaattcccaggtatacagtcatattatctgcaaataatggtaattgttgccccttcctttccactatggagatttattttccatgttgataaatgttgtgtgctattacagaacaaagacaatggtatcttttgtttcctaattcacataggctaatgatttcaaactgcaggttataacccatttgtgggtcattaaagccttctggtatattatgaccagagttttttaaaaatgaggtaaaagtagaatagaaaaatatcagagaacattacatatagtaagggttatgagtcttaccttttagttttacgtatgtgtgtgcatttactgggtcatatggtaaaatttcttactgtaagtggcagtaaaaatatgtttgaaatgtactcatatcagtgattttttttttttggaagttacagatacttttcctcatcttctggaagttagaggatagtgtctcctcttggttccatctctccttgcttccccctgagtagtaggaggactgagtagaattatgtaagcactgtgatggcttttcagccttagatggaatgacagtaggtagccaaagctctgggttggaatgcaatatcttcagcagaatctccacgagttagagaccaaagccagcttactgaaaagaggcagaaagtgaagaactatttgttgagttcagacagtatagtgagtgagtccatttgcattatgttttttttttttttctttttgagacagggtctcactctgtcactcagcctggagcacagtagcacaatctcagctcattgcaacctctgcctcccaggttcaagcgattctccagcctcagctgggaccaccggcacataccaccatgccctgctaatttttgtatttttttagagacagggtttcaccatgttgcccaggctggtctcaaactcctgaactcaaagtgatgtgcctaccttggcctctcagagtgctagaattacaagcatgagtcactgcacccagcctttttgtttgtttgtttggaactatttaccaaacgaagcacagagattgcatatccacagcttgatttcgcaactacctttctgactacttgggcaactcagtttctcaaggaggtagaaatgggtgagatataatcagggtgtaatcccttgagagttatcacacctgtccctttagggactgcctaccaaacacaaagggatgtcctaggaggcacaggaataaatgaggcatggtccttgcctttatggggctgcttttggttctgttacattagagttattcagacacttctatttagtattcaggtatctacaatttaacacaaaatgtagaaagcgctgtaaaagggagcatcaaactggtcaaaagctcctgtttgtaagtcgatagtcattcagtaatagaaaggtattcttttaaaattaggcaatacatgactatcatttgcttttatactctttaatggaaatagatagctgttcatacttagagttcaaagcagccccaggaaccaggttctctgccatgccctgagcagccggagctgatggagcttctctctgatgtgcagcccttcacatggccaagtctgctgctggttctgctgcctcatacccagctccagcttgtgcttactcacagcccactcctgcctctccattctgtggcctttcagtttctgctgctgcctgcgcaaagattttcctttttcttatgtttgactctcaagaaagaaggagtgaggggaaaagcagaaagcagaaataaatctgtctggtcaagctcaccgctactgtgccagagctttttattttccagcccatcagcctctctttgcagtcttgctgttctgttgcattgtcttcacttgcacaaccctgattatatccaaccctccacctactcagcacctgcgttgctgcagctggataagacttgggtgaagcacgcaattgcgctgactcacctgcagttcgtgatcattgatctcaagtgagttttcagtgctgttcaccagttgtgttacccctcaccagtccattcactgtgctacttttctagacaaccaatttgttcataccttctgctctttccccaaactccagcacctcttcccccatcctcagtctcagctgatgaccttgcttcttattttaatgagaagatgggagcaatcagaatagagcccacatagggtctttccaccacatcttcccagcgagtggctctgcccatattctctgccttctctcctataactgcacgagtggcccacatacctatcttagcccagcctctccccttgtgtgttagattcatctccttgtgcctgctcaagagcattgctttagcagttttccctactcctgcatcaccaatttcccctctctctactgaatcattcttatctgcaatacaaatattctcttatttctcccatgttagaaaatcctctgtggatgtttctttctccttctcctatccatttctgccttacattttcagaaacatttccaaaaaaattcctaacttttttgtgccataaagacctttaatggtctggtgaagccgtggactccttctcagaataatgttttaaagtgcttaaagtgaaacataaggctaaaaaagaaacacaggatattaatatactgatcaaaataactttccactgttgtgatacggtagcatgttacaaatgaagaaactgaggcttagagagttagacacccaaaggcaaagttagtaagtagcagtcaaggatttaaatcaaggtttctgattccaaaacctgtcactcttcagtataagaagtttccttccatcggagcacttgtagagcagaagagcacagtcacatgagacctagtgatgggtacagtaattactgtaaatttgaaatagtaatgagcatgatgttttgagatatatgtaacaactataatgtaatatgaaaatatccacaatttctataggctatgaagtaacagatgctgctattatattattagttgaagaaaatgctgcattagggaggagtcaaaatacagatgtaattttttttccatcaaaatccctgagctctctgaattctatccatagattctttggggaccctcattttagagactctgctttttatagcaaaattccatttcagagtttttctattccctgccttctacttctcttcaccctttattgagtctgctctgatcaggcttttgcccccataatctagtgaaactgttcttgtcagggttgccaatgacttccatattgctgtggcccatgatttgcttgccttatgagcagtatttgagaaaactgatcattcttctttacttttcttcacttgtcttcaaggatacacactctcttggttttcctctggcttttttggcaactagttctcagatacctatactgattcctcatcttctgactgctagattttggagacccagcactcagtccttcaatgtcttctctttctgcctatatacattctttcatttatctcatccatccttgaggctttaaaatattcaatgtattctaacattcctcccaaaattataactttggtcctaacctatctcctgaattccaactgcctactcaatacctccatttggttgtttaataggcaaacaaattaatcatgtccagatctgggttcacctgcttttcctgtggtctttcacatcccagcaagtggtatgtcgattcttctagttgcttgggtcaaacaccttggattcaggtttaactctccttctcacatcctgcatccaatccatcagcaagtcctgtcagttctgtcttcacagtatattctgaatgttacccttctccaccaccttgctgttgccccctacaccagcctctaaggccctttccctggaatttcaccctagcctccccaccctccccaccccctccctgctcctcttttctatccctatatttggatgtttgcaaatcctacaaacaacctatccaccctgctcctttgaattcagaagaaatatgcacagttgccaaacaaaattgaaaattcttccaggtaccagggattgctaatgtacatgattccaaaatgatagatgttttcctataagtgacttatggaattcattcagcagcaaaaacattaacttgataggattttaaatgcagctctgtaggtttggtacccatagaaagacagtttcaaaagcatggtacttcaactttaggaccttacttttaaaggacgttcagaaattgtttcacatgtacaaatgaaattgggacgtacatcctccaaatataaaggaattatttctgatatgtgactaccaaataatacaaaatgtgttagctaatagctgtattcttctactgctcattctctgttataaaatcagaaaataatagaaatgcttcaagtagcttagagtgcaggtaactttccttaacaattaattaagtcatttgttcactaaccactgtttaatggcttttatgtgccaggtactccactgggtgctggggatacaaagaagaataaaatccaatggatattcttaaagagatcacagataagtgggagaggcagaggaataaacagctgagtacaatacaaatatgatccatatcataatagaggtgataaaaatggaattatcagctctgtttaaataggtcagaaagtttcatccggaagcattgcgtgggattccttgaaaaaaacgatagaatcattgtcacaatgtgtaaagggtacctatccttaccacacctcaaccgtgttacaaaaaggagttggcttggaattctaaggatgaaaaacagatatcatatgtgttataaacaccctgtgttgaaaaaatgccagtctggcattccagaaagtggaatctgttctgaaacttcctaaaactttctaaggtaaatatattccagaacttctcttattcatccagggattgagaatgcttcttagggattcctaatataagtaattcaccttcatcatattacaacttttctctgtggtggtgtaatatatacatattatatgatgtaattatatatatatactatagcagccatgatggcacacacctgtagtcccagctactcagtatgcagaggtaagaagatccctccatatattattatatgtatataatacaaattatattatatagtggcaatataaattatattgtatagtagtaatagctgcaatgtaagagatttcagaatcaattttctataatctactttaagagatttcagaatacactttgggagggcgaggcgggcagatcacgaggtcaggagatcaagaccatcctggctaacacggtgaaaccccatctctactaaaaatacaaataattagccgggagtggtagtgggcgcctgtagtcccagctactcgggaggttgaggcaggagaatggcatgaacccgggaggtggagctagcagtgagccgagattgcgccactgcactccagcctgggcgacagagcgagactctgtctcaaaaaaaaaaaaaaaaaaaaaaagatttcagaatagattacacgcacgtatgtatgtatgcatgtataaatgcatgtatctatgtaggtatataatgtatcatagagtcacattaaaaaaccagtccctctgaatggagatgagatggaaactcatggagaattactagaaattaccgaattatactgcctgagtatgtgaaagtattaccttgctttaattttactttacttagtgttgggtccatgaaatcaggaaacaatttcccagtcttccacattttagtcgtgaggaaacagatcaatttttagaggtgaggaactttcctagggttacccagccaatctgcaagagggttaggaatagaatccaagtttccttagtcttatggttcttcttgcattttgtaaatgagcttttattggctgatgcttagcaaaaacgtttcccattagaattctgtaggccagtctgaaattatctggccaagactgatattttgtacttgaagaatggaatgtcagctagatgccatccgggcctccacccaggcttcctccagctccctgcacctagtttctataacagcaagtcatgtgctcagcaaggggctacacggggtcatgggcctgctgccaagactggggagcaaagcacggaagttcaagtctagacagcaatgtgttgaaagccaagctagcaggtgagagatccagcacataaataaagaccaagatgggatggcagagtctttaaggacaccctgccctatgcaactgagagggcaaatgaggtgaggtctaaaagcaaagtagtggagtcctctggagtttaggtgttggacccagtttcagaatagaagcaatagctaggaggaggagccaccacatagtctggaggctaactctgacttgcagttgcttttgtttggttgagcatagttgttattatttcttaaaataatgcttacctgaaatactttcatgtgctctccatttcaccatggttccacctgttgcctcacacccattcagacaagtccgcaatgagcccagccttgctgtttcttcagagttctgggtattgcacaactgggcagggagtgagcacagttccttaagacaagctggcaatcctcatagactcacaaatatgaatgtagagagattccaacttgaggttcttttgcagtaggcaaaatcaacaaacgctcagtattgactacatttgatcttttaggaatcaactcaatgttttatgaaactgacttgcaaaattcaaaaggtctaaaaaatattagaatgaaaacaggatttgtgagttttaccagctgctggagtccacaaactgcaactgtcttggtaaatatcttttggaaagttctgattgtcagaaaacttcagactatacatgccaaagatctgatactggaaatgtcatgaatcatataagcccctgcctcacacagggcaaatttcatctaaactcctcatgctgggcagaacaatggctgcccaaagatgtccacatactaatccctggaatctgtgaatatgttgggtttcatgagaaatgggagttaaagttgcttattaactgggtatcatagttcacgcttttaatcccagcactttgggaggtggagccagcaggattgcttgaggccaggagttcgagaccagcctgggcaacacagcaagactccatccctacaaaaaattataaaattagccagccaaggcagcacacgcctatagtcccagttacttaggatgcagaggtgagaagatcccttgagcccaggaggatgaggctgcaatgagctatgatcatgtcattgactctaacctaggcaatagagggagacccccatctcaaaaataaaataaataaaaaggtaaatttacttatcagttgaccttgagatggggagattgtacaggattatcccagtgagtcttatgtaatcacttgggttcttgtgagtggaagagggaggcagaagagagagaacaagagagatggcattgtgaggatgactcagtctgacattacttttttgaatattgtattagtccattctcacactgctataaagaactacctgagactgggtagtttatgaagaaaagaggtttgactcacagttctgaaggctgtacaggaagcatggctgggaggcctcaggaaacttagaatcatggcggaaggcgaaggggaaggggaggcaggcacatcttaaccgtggtggagcaggagagagagagaaaagggcgaagtgccacacacttttaaataaccagatctcgtgagaactcactatcacaagaacagcaagggaaaaatcagccccataatccaatcgccctccaccagaaccctcccccaacactgggaataacaattcaacatgaaatttgggtagggaaacagagccaaaccatatcaaatatggaggaaggggcctatgagccaagggaggtggctggctttagaagctggaaaaggccaggaaacagatcctcccttagagcctccagaaggaacacagtcctgctgacaccttgattttaggccagtgagatacattttggacttctgacatccagaactacaaaatattaaacttgtgttggcttaagccattaagtttgtggtcattcttacagcagcaataggtaagtaataaactcttagatgaagaaaggtcagtgaggcatgactagattagtgtggctcatctgctgtcgttcatgttgttttaaaccaagattcaccatttgatattcattatttggcatttgcagctgtcatcattttttagatgatgaaactatgccttgttttcatgggataatgtttgtgaagctctcaaattcctaaaccaatcaagtaaggtgttttttttttaacttatttatttatttatttatttatttatttatttatttatttttgagacggagtcttgctctgttgctcaggctggagtgcagtggcacgatcttggctcactgcaggctccacctcccgggttcacgccattctcctgcgtctcccaagtagctgggactacaggtgcccaccaccatgcccagctaatttctttttgtatttttagtagagacggggtttcactgtgttagccaggatggtcttgatctcctgacctcgtgatccgtccgccttggcctcccaaagtgctaggattacaggcgtgagtcaccgtgcctggcctcaagtaagttttaagatggcaaaagctaaggattctaaggcagctctcaaaatcctgaagatacattatgaccttgccacttaacactgtcttacttgtcaattatgatcctgatcacaaaatatggttgcatgtttagatggaaattcttctttggtaaagagggaaccaaattacaaagtacaatagactgatacatgctgaggttactacaaagactctagactgggcctggcatagtgctcatgcctgtaaccccagcactttgggaggacaaggtgggaggattgcttgaggccaggactagccagggaaacatagcaagagcctgtctctacaaataaataaataaatgagatacaaaaattaaccaggtgtggtggcacgtgcctgtagtcccagctactcaagaggctgaggcggaaggatcacttgagcccaagaggtcgaggctgcagtgagccaacattgtgccactgtacctccgttgtggacaacagagcaagaacctgtctcaaaaaaaaaaaaaaaaaaaaagaagaagaagaagaagaaaagactctagactggtaaagtaaaaaataaacataaaatgaaatcattttactattgttctattcctattacaatagaaatagaaattgttctattcctattacaatagaaatagaaattgttctattcctattacaatagaaatagaaattgttctatttctatttacaaaggaaaaacacattctgacacctaataatttctaaattggtgtgacacttattaggttgccataataggattaacaaacatataggaggagctaattgcaaggcatttaacttggaaatcacaaccattgccaaatggctttatagttggcttttgtggttgtcatggacaggaagaaaaatgagctatttaggaagtgagtctcgtctgaactttccaagatatattctagtttttgtgtgaggaaataattcaggttttgttgttgttgttgttgtttgtttgtttgttttccaaacttgcacttaagtcatacctcttttaaggtggatccagtcttaatgatttcttttggcatggctagatcctggttattaaaagtgtacatggaggaatgatgtacaaattaaggggggcgtcaaggtaggagggaggcaaaaaaggagaggtaaacagggctgggagtatggcgaggcagtgaggagcctaagtagacatttgaggaggcgctctctctctggactatcacaagccatccctgtacttgcaggaccctgagggggagtgcccccttaagagtgaggtaggagtgccctgttacattttgcatcttagacctctcttgcctcaatctcaccctggaggtgacagcatggctggtgatggctgtaatgagggatataagcctgcctgtagcttggaaagcatgttttgtcctcagaatcctcatacaggctgggcgcggtggctaacatctctaatcccaacactttgggaggccaaggcaggaggatcacttgagcccaggagtgtgaggctgcagtgagctatgactgtgccacagtactccagcctggatgaatgagtgagaccttgtctcactcaaagaaaagaaaagtaaaaagagaagacaatcctcatgccatccctctttggcaaaacctggactgttagagagaattcccagaaggcctaacttagtatggccccagatcaatgtagaactgaacatgatctctcctttgaaacacccctcctgaggctaccctggtcaaggttcaaggctcacccctaaagagaacttacccctgtggttggctctaggcgaaatcacaccttccatatattacggaacttcagagaacagggattcattcagccctcctacataccttttgatttaggaaggctttcagtgaatgattatccaaatttgtactatacaaatggaaacatttaaaattttataaaatctatatgaagtcggaatgttgatatggtgaacatgatatttgcatctctggatgtgctgcctttgtcagttctgcctatgtgcgaggggttgcttgcatgcagtgctaatgctacacaatgcagatataggtttgatttggaggagaattcataagcagccatgtagcagtacgcacacaatcccttgaactctcaacctgcatcctaggctaggcatggatatctgtatgcaccatagccacagctctggtagataatgctctactatttatagggtcagtaggcagggagcatctatgtgcttgtgtaacagtggaggctctctgatcagggaagtgcccttattggagaaggaaagcccctggagcccagtggttggtatcagcctatttttttgttcatttgtttagctgagccagctttctgctaagctagcaaaagagggaaggaaatgagtctccggagccacccagatttgtctcttgctaaccacaggttaactgttctctttacctgattgtaagcaatttgggaggaaagacaaaattgtatagatctttgcaactcccatggtgtcctacctgtagttgaatgcttagtacgtacttgttgactgagcaaatgatataatagacttcaatcaatgctgaatgactactgtaataaaaaataaatattaatatatgctttgtggcaacttgaaagcatgggcaatgccttcataatggccaactacatattttggcagataacaaaccagtacatatggttgagggtggctgttgtatcttaatgtggaactcagtagcacccttttcccccccagcctttttcacttttgtttcaaaacatttgtttctgccatattgagagggggagttaagataaaagacctcctttagttgtcagtgcattggggtttccagccaactttctccttaatgcctttctagtagtgcatagccaaagcatatggaaggagaagtttaggggtaaactacagtgttcatttcagaaatgttctttttttttttttttttttgagacagtgtctcactttgtcgcctaggctggagtgcagtggtgcaatctcagctcactgcacttccacctcctgggttcaagcaattctcctgcctcagcctcccaagtagttgggattacaggcacctgccaccatgccttgctaattttgtatttttagtagagatggggtttcaccatgttggccaggctggtctcgaactcctgacctcaggtgatccacctgcctcagcctcccaaagtgctgagattacaggcatgagccactgcacctggccagaaatcttgtgtatatctggtattcatcatcatcctcactgtagcaaatatatttttaaacatttactgggtctgccctgtgcggagctctttatgtggattgccttacttagtccacaatcctgtgtggcagtacgctttattaacccacatgtctagacccgagctcaccttgggaagagtccttccaggtgtttgttttctattccttatactccagaacctgtcttatatagggattatactaagagccaaacaggttttgcttgagttttcccagtgccttccaaattggcagtcatctttttatccattatgatttcagtctttcatagcagggatatgatattcaaggggcatatgacccaaactcagtttatacatattgtttaacattgtattaatacccccacatcctagctgccttcttattgaagcatttgttttaaaggaaagctatatttgtttggttggtaaatagtttcttgttaatgagaaaaacacaaacatgtttctaaatatatccatttaattttgaaaaagcaaaccgcatattaaggagacctagtggttttataccagagtgtctgaactttggcaccgctgacatttccgactagataatgattggttggggagacctgtcctgtgcattgcagggtgtttcgtacctttcctggcttctgcccaccagatgtcagtaccaactcctcctcccaattgtgagaatgaaaaatgtctctggacattgtgaaatgtcccttgggggaataaaattgcctccagctgggaaccactgttctaaacccatagtttaaaaagctttgctttgcaccagaatagtagtctgatgtttcctcttgtggctctgcagtcaggtattgtacgtagtttcaatattttggctttctatgtgggtgatcaagtacttcacagtccttatatcaatataaatatgcataattccttcccttcaacaatttgtaatcaagataagatttaacatttttcagtcgactattttaaaactggtgatactttattccactatgacattctcttttttttcataaatggaaaccttttaaaataggcatgaataattttatgcctcaagcactttcattcttccaagtgtttatgtaaatacagagtaaactggttcaatttatatcttttttgatatctcatgtatttatttgttttctctataacaaagagaggggttttatcaggaaatcacacacaagaggaccataagtctctaattttatgcataaaaaaggagataagagaatataatcatttaaagaggcctgaaaaaccttaagaaaggatccaggaataggggtggggccaagatggctgactagaagcagcggcttttggaggctcccatggaaaaaacccataataagcgtgtgaatccttcactggcaaccaggtatccaggttctctcatcaaagttgactagagggctggcgtgacccacggagagaaggaagaacagtgtagtaccgcagccaacgggaggtggtgagtgagcgcactatccccccagagaaaactgtgcttttccactcacgaacccaagccacccaccagggcctagcgtcccaaccccagaatgtgcacattcttttttttttttttttttttgagatggagcttcgctcttgttgcccaagctggagtgctatggcgcaatctcagctcactgcaacctctgcctcccaggttcaagcaattctcctgcctcagtttcctgagtagctgggattacaggcacctgccaccatgcccagctgattttttttgtattttttagtagagatgtggtttcactatgttggccaggctggtctcgagctcctgacctcaggcaatccacccgcctcggcctcccaaagtgctgggactatatgcatgagccactgtgcctggccacgagcacattcttacagcctctcagctggagtcagcttaagcctacagaacccccgcaggggaggggcagccagcacccactgtggctgcctgctgtctcagctgtttgagctccttgcgggagggacagcagcctgcactgggattcgcactgcctaacacgctgagctccctgggcgggggaagggcggcacccatttctatacgtccaggctgtactttttccctgctggagccagggaggctggacagcttggtcccaagacttgtccccacagcccaacagaccggctgtgttagtttgtggccagtgtcccttcaggcctgaccctgacccatccttactcattgggtgaggcttccctgcaggaactccaataacttcagccagaggcttagggacagaatctggatgtccctgggcctgagcctctagggggaggtgtggccgcagtctctgtggaccagcaaacttagcctctcctcttggtagttctgaggaatctgggtagcccagatgagtgggtttcccccagcaaagcacaccccctccaccaagggacaaagtgctttgttaaatgggtcctgctccccgtgccactcaactgggtgacaccctccaacaggggttgtcagacaccctatacaggagggatcctgctggcatcaggttggtgcctcttgaggtcagaggtcccagaagaaggaccaggcatccatctttgctgttctccagcctccttgagtgacatctccaggcactggagtgaatcagatgaatagggcctgaagtgaacccccgcaaactgcagcagccctgcagaagagggacctgactattgaaagaaaaacaaacaagcagaaagccacaacaatgcatcatcaacaacaacaaaaggcccccacaaaaaacccatccaagggtcagcagcctcaaagactgagactagacaaactcacaaagatgagaaagaatcaatgaaaaatgctgaaaacccaaaaggcaagagtgcctcttctcttccaaatgattgcaccatctctctgtcaagggcacagaactggacagagggtcagatggatgaattgacagaagtaggcttcagaagatgggtaataaaaaactacactgagctaaaggagcatgttctaacccaatgcaaagaagctaagaaccttgataaaaggtaagaggaactgctaactaggataaccagtttagaggaacataaattacctaatggagctgaaaaacacagcacgagaacttggtgaagcatacacaagtatcaatagctgaatcgaccaagcagaaaaaaggatatcagaatttgaaaaccaccttactgaaataagacatgcagacaagaatagagagaatgaaaaggaatgaacaaagcctccaagaaatatgggaattcgtaaaaagaccaaacttacaattgattgggataccagaaggagatggagagaatggaaacaagctggaaaacacacttcaggatattatccaggagaacttccccaacctagcaagacaggccaacgtgcaaattcaggaaatacagagaacatcattaagatactccatgagaagatcaaccccaagacacataatcatcagattctccaaggttgaaatgaaggaaaaactgttaagggcagccagagagtaaggccaggtgacctgcaaagggaagcccatcagactaacatggatctctcagcagaaactctacaagccagaagagactggaggccaatattcaatattctctttttttttttttttttttgagatggagtctcgctctgtcgcccaggctggagtgcagtggcgtgatctcggctcactgcaagctccgcctcctgggttcatgccattcgcctgcctcagcctcctgagtagctgggactacagatacccatcaccacccccggcgatttttttgcattttttagtagagatgggttttcaccatgtcagccaggatggtctcgatctcctgacctcatgatccaccctcctctgcctcccaaagtcctgggattacaggcgtgagccaccacacctggcctattcaatattcttaaaagaattttcaacccagaatttcatatccagccaaactaaggttcataagcgaaggagaaataaaatccttctcagacaagcaaatgctgaggggttttgttacccccagtcctgccctgtaagagttcctgagagaagcactaaatatggaaaggaaaaaccagtaccaggcactgcaaaaacacaccaaaatataaagaccaatgacattatgaagaaactgcatcaactattgtgcaaaataaccaaatagcatcatgatgacaggatcagattcacacatagcaatactaaccttaagtgtaaatgggctaaatgccccaattaaaagacacagtgtggcaaattggataaagtcaagacccattggtgtgctgtattcaggagatccatcttacatgcaaagacatgtaaagctcaaaataaaaggatggagaaaaatttaccaatcaaatggaaagaaaaaaaaagcaggggttgcaattctagtctctgacaaaacagactttaaaccaacaaagatcaaaaaagacaaagaaggacattacataatggtaaagggaacaattcaacaagaagagctaactattctaaatatatatgcatccagtacaggagcacccagattcataaaacaagttcttagagacctacaaagaggcttagactcccacacaataatagtgggagactttaacaccccactgtcagtattattagacagatcaacgagacagaaaattaacaaggatattcaggacttgaactcagctctggatcaagtggacctagtagacatctacagaactctctactccaaatcaacagaatatatattcttctcagtgccacctggcatttattctaaaattgaccacataattggaagtaaaacacttcagcaaatgcaaaagaactgaaatcataagaaacagtctctcagaccacagtgcaatcaaattagaactcaggattaagaaactcactcaaaccacacaattacatggaaattgagcaacctgctcctgaatgactcctgggtaaataatgaaattaaggcagaaatcaagaagttctttgaaaccaatgagaacaaagagacaacgtaccagaatctctgggacacagctaaagcagtgttaagacagaaatgtatagcactaaatgcccacatcagaaagctagaaagatctcacatcaacaccctaacatcacaattaaaagagctagagaggcaagagcaagctaatccaaaagctagtagaagacaagaaataactaagatcagagaagagttgacggagatagaggcacaaaaacactccaaaaaatcaccgaatccaggagctgtttttttgaaaaaattaacaaatagattgctagctagactaataaagaagaagaaaagagagaagaatcaaatagacacaataaaaaatgataaaggggatatccccactgaccccaagaaatacaaattaccatcagagaatactaaaaacacatctatgcaaaaataaactagaaaatctagaagaaatggatgaattcctggacacatacaccctaccgagattaaaccaggaagaggtcaaatccctgaatagaccaataataagctctgaaattgggtaattaatagcctaccaaaaaaagcccaggaccagacggattcacagctgaattctactagaaatacaaggaggagctggtaccatttcttctgaaactattccaaacaattgaaaaagagggactcttccctaactcattttatgaagccagcattatcctgataccaaaaccaggaagaggtataacaaaaaaaagaagacttcaggccaatatccctgatgaacatcagtgtgaaaatcctcaataaaatactggcaaactgaatccagcagcacatcaaaaaacttatccaccatgatcaagacggcttcattcctgggatgcaaggctggttcaacatacgcaagtcattgatagaacacatctcaaaataataagagctatttataacaaacccgcagccaatatcacactgaatgaacaaaagctggaagtattccctttgaaaactggtacaagacaaggatgccccctcctaccactcttatccaacatagtatttgaagttctggccagggcaatcaggcaagagaaagaaagaaagggtattcaaataggaagaggggaagtcaagttgtgtctgttcacagatggcatgatttaatatgtaggaaaccccatcacctcagtcccaaaactccttaaactgataagcaacttcagcaaagtcttgggacacaaaatcaatgtacaaaaatcacaagcattcctttacaccaacagcaggcaagcagagccaaatcatgaatgaactcccattcacaatcactgcaaagagaataaaatacctacctaggaatacagctgacaagggatgtgaagaaccttttcaaggagaactacaaactactgcttaaggaaataagacagaacacaaacaaatggaaaaacattccatcctcatggataggaagaatcaatattgtgaaaatggccatactgtccaaagtaatttatagattcaatgctagtcccatcaaactaccattgacattcatcacagaattagaaaaaaactattttaaatttcatatggaatcaaagaagaccccatatagccaagacaatcttaagcaaaaagaacaaagctggaggcatcatgctacctgacttcaaactatactacaaggctacagtaaccaaaacagcatggtactggtaccaaaacagacgtatagactaatggggcaagaacctcagaaataacaccacacatctacaaccatctgatcttcaacaaacctgacaaaaacaagcaatggggaaaggatctcctattcagtaagtggtgctgggaaaactagctagccatatgcagaaaactgacactggaccccttccttatgccttacacaaaaattaactcaagatggattaaagacataaatgtaaaacccaaaaccataaaaaccctagaagaaaacctaggcagttccattcaggacataggcataggtaattaaagagcttctgcacaacaaaagaaactatcatgagagtgaacaggcaacctacagaatgggagaaaattgttgcaatctacccatgtgacaaaggtctaatgtccagaatttacaaggaacttaaacatatttacaagaaaaaccccacgaaaaagtgggcaaaggataggaacagacacttctcaaaaggacatttatgcggccaacaaacatatgaaaaaaaacacaacatcactgatcatcagagagatgcaaatcaaaaccacagtgagataccatctcatgccagtcagaatggcaattattaaaaagttaggaaacaacagatgctggcgaggctgtggagaaataggaacgcttttacactgttggtgggaatgtaaattagttcaaccattgtggaagacagtatggcgattcctcaaggatctagaaccagaaataccatttgatataccccccaaaataaatcattctactataaagacacatgcacatgtatgtttattgcagcacgatttacaatagcaaagacatggaaccaacccaaatgcccatcaatcatagactggataaaagaaaatgtggtacgtatccaccatgggatactatgcagccataaaaaggaatgagatcatatccttgaagctagaagccatcatcctcagcaaactaacacaagaacgaaaaccaaacaccacgtttgcactcacaagtgggagttgaacattgagaacacatggacacagaagggggaatgggaacaacacacacagggcctgctgggggttggggagtgaggggagggatcttagagggtgggtcagtaggtgcagcaaaccaccatggcacacatatacctgtgtaacgaacctgcataatctgcacttgtatcccattttttgtttttttttttgtttttttcctccctgagatggagtctcgctgtgtcgcccaggctggagtgcagtggcatgatctcggctcactgcaacttccacctcccgggttcaagcaattctccctgcctcagcctcccgagtaactgggattacaggtgcccgccaccatgccccgctgatatttttttgtatttttaatagagacagggtttcaccacgttggccaggctggtcttgaactcctgacctcaggtgatccgcctacccttggcctcccaaagtgctgggaatacaggcgtgagccactgtgcccaccagccccctcttttttaaagaagaaattatatatatataaatatatatatttataaatatatttatatatagataggattcagggatagtcaatggtaaaaacttacctaaagtttttttttctttctaaatttatccaattaatatttttcaagcataacacctgttccctttctttaaaaaaaaattaaatcctttgtcacctttgcacctcaaagaaaatgcggaaatatctaaaataccagcttacttccatttaaatatgccccaaatgaagggaatttgagaaaacacttagggcatgggatttgataacctgcttcagaaacctagtcctgtgcctgataacctttactgtcttagtcagaaaatgtattcctatgtctgacttaaatctctcaagctgcagcaaggcatgttttctttcactctgccctcactgcgaaatggctgtctgccagcccttgagtttgagcctttcaaattcttaaagtatgttatctaaagtcttcccttggctttttatctacagatgagttggtccagattttttgccatgactttcataactctttcatcatctgcagcttcccccatgcttccttcaggatcttcttcacttttctttgagttgcagattcctaaaaccaagcagggttgacaatgccaggaaggtaccttagctaacagcctacactcacagcacctgttcaggtaccctgattggccttaagtgactgttctaactggaataaaatcctctctttatcatcaagcaaaatggtcagcttttctttgccttcagaatagtctctgcatggtgtctgctttcaaactttccaaagtgcttagtttaccacctctccctaaatataccactgtctatcttataaagcccgggaacacagaaattagcagcaaatgatctccttattttctgtttttaatgcctgtgcaccttaacaggttctttggctgcaatcagactccctcctggcgtctttgttccttttccctgggccctgcctctctgactgggctttgacagcagcagagactcttaccatcctcacggtctcctcctgcagctctttttttctaatccgtggcagcaagctaggcttcaggacaaaagcctcttggagaatatttgagaactttcaatccgcctgtgacccttttgaaacaccaactcaggatgctttttattcctggttgttatctttgcaatgatctctactctacctcagtttcttttctttagaaactgtgtgctgacctgattgaaatattctcagcccacatgagggaacagctatgacagccagtgaagaggactttccttgctgtgctcttcctggctgagaccaggaaaggagggccggcctatccatcacatgtcagagaaagaaaacaggaagaatggccgagatgtttaatcactttttgaagctgtttttcttattcaaaatcaagtcaatatttgattttaaaaaacacacactaaatacaatatggtattctgaattgcaatgctcctggaacagaaaaaggacattagtagaaaaccagtgaaatctgataaagactggcgttttattaataataacgtgccagtgttactttcttatttatgacaaatgcaccttggttatgtaaggtgttaacattaggggaaactgggtgaagggtatatgggaactctgtactatctttgcaacttttctgtaaatctaaaattattccaaaataagattattttaaaagatagcctatattttttctttccagtaatttgggttattcacctctatttctttactggttagtatattaaggacctgattcaggaaaaaatatgaacataaactaaagcttttgtatgcagaaaagaatggttaagtctatagctagctgatctaggtccctaaatgaaaatacctgaacatatattagggtccttgcttgttctgttttccctacctctgttctctgattacctgtaaattatttactcatttccatgttttctcattcagtaaacatttataaaactaggtactgagtttaactcaaggaaaaaaaaaagagatggataaaatgtggttttcacctcagagtacacaagctagtggggaataaacatatagagataactgctgaataatgtaagtgcaatgataacaaatgtacacagtaattttaatgggaactaagcaagcctgaaaaaggttatcagaaaaaacatcctaaaggtgacacgcctccgccttcaggatgagtaggagttaggatgaatgtaccaaagagacacgtcagggtagcaatctacatgatgtgttcagggagctagggagtgacaagcttttcagcatagcatgagggaagactgataggatgtggagggagatgaagctggacaaaagacaagagcctgacttagggccatcagaattaggaaggccttctgttgctggacaagactgtagtttcaccctttaaatcataagcagatgaaagtaggacagcaaaagataaagaccagagagtttcatctcacctttattctccatcagttacagtggctcaggcattttctgaaaatatggctaaccccaaaggagctattcttgccatgaaggaagttagtggcttcatagatagagtaactgctcttaggctcttaccctcttccctagcagtggggaacagtggtttatttttaaagtttatataggtactaatgctcaatgattgctacttacaaataatgcataagacagtgattttcaccccctgcaaaagaaatgttttgcttttactcatagggcaaccagtggcttcaactgctttctatttttgaaaactcatgtgatgaaacatgagaagttcttatttaaaggggttggtgagatgcttcttttaaatgctgtcacactgttgatcatgcttgaattggagctaagaataaaaattcaactgagtaatttctgttgatgtagcgtccctcaactttttggagaaaaatgtcaagttttacattctggtttcattgcagttcctggaggctactgagtaggaagaggatagcgtgatgtgtgtgcatgcatgtgctcatgtatagaaagacaggatgaggtagctgcttatacagagctagaaggaactctagctaacttagagttttgactaaacactctttttacttaaaggtaatctggctgtatcagggtttactcccattgagttgaatatgaacttgatagacgaagtggagaattctttcagttttgtgaaaagtttaattatgaaattgttttagacagtaaatgacacattcccatttcttgtcagtgaatatttattgaaatctagcccttcttgccttgcctttctggttgatctctttagctgtcaagctcgctggtcatctttcccttgctgggccttacatgtcatgttttcttgagttgtgaagaataaccatttgttagctaaagacctttctctgatctaaagcaactgatacttgaaagagtaaataaacggaacctgatccctactttatattgccaggtacaaaatacatttgtggctattctatcatattatttttgtaggtctctgaattaaagagagcaaagcttctttctactcaagacttgcaaacacttggttttgacaatcaaattatctcgttcttaagtttatgaatcgttgtcttctgctgcagagagaattggatttttagttcgaaagatgagtgcacatcgggaagatgtgttttagggggaagcaatatgtattttgcattatctgtacgatgtgagaaactgtaaattgataatacaatatgttagtaaatgaaatggcaatgagtagcaagcaatgggctggagagaactccaggttgggggtagaaaatgattattataggcatcctaggcatagtggctgaactttctgttttctccttctttgggaaatgggtttaatattttaggttcatctgcaggcctgggctacatttaagagtacagtatcctggcacgcacttgaaccatgctgagaggctgacagccaaaatgagctggaccttgttctcactttgttatttgattgcaggcgatgaggggaaatgatagcattctagttcttctttttgaaaaactatgcattacatttcagaatgtttcactgcccaatagtgcatagttttcaagtgtagttcctctcttaccacacagctaagtaatcctggaagccaaataaatggactgtatttatttcaaattcagttcttaaaagatgtctcagctgggcgcggtaactcctgcctgtaatcccagcactttgggaggccaaggcaggcagatcacctgaggtcaggagtttgagaccagcctggccaacatggtgaaaccccgtctctactaaaaatacataaattagctgggtgtggtggtatgtgcctgtagtcccagctacttgagaggctgaggcaggagaattgcttgaacccaggaggtagaggttgcagtgagctgaggtcgcaccactgcactctagcctgggcaacagtgagactccgtctcaaaaaaaaaaaaaaagagttatctctaattgttactgtctttatgttgagtatgttagggttcactaatttatggtgtatatctggatttttttcccacctggttagtggaataaaataggaagttgaataacatggcatttattatgatagtaaccaacagggcaactggagttagcatacttgtagcttttgtaaattactcaattgtcactcaataacaggacagttatttacttgattgtgattggccgaggaataataatggctccatttcagcagataaatagtgaggatttgaatctttagtaaaattaatgacagctggaggaattcccagctgcacatgtaactagaagtgcttaactacccaattaatcatgaatggatggattcagtgaaacacaaaattcaatctgcttttgcagcggtggttttgaaaaattggaggcaagcgtttttttctctattgaacgcaactctgagtgtctaggaaaatgccatacattttttaggatgaatgcaaagaaatatgagtcccatccttctttttttgcccttcttccctcccttctttcctatacatacttattatacacctactatatgccaagcccacaatggggacacaaagatgaaaaagatacactacctgcccttgaggagttattgtcagaaaggtaaaatagccacacgtacagttgtaacacaacggatggatgaaatggagtttgccagatgggcaaggagaaaaggggctttttaaataagagtcagtctcctgtgcaagagcagggagctttcagagtatgtacctaccttatacaacaagtattttacctgggtgcctactatgtgccacacagtgtggatgagatatgtttggaaaagtgtgagaagcatgttattggccagagcatgtgggaggagaaagataaaagatgggcctggagattgacagggacaatttcaaatgtcactttaatagtgtcattcccggttttattcttcttttcaaagtaaatgaattttttttttaagacaatctctctctgctgctcaggctggagtgctgtggcgcagtcttggctcactgcagcctccacctcttgggttcaagtgattctcctgctttagcctcctgtgtagctgggattacaggcgtgcaccaccacatccggctaattttttttttggatttttagtagagatgcggttttgctgtgttggccaagctggtctggaactccagccctccagttatccacccgcctcagccccccaaagtgctgggattacaggtgtgagccaccatgcccggcctcaaagtaaatgaatattttcttatttttgttctagcttaatgttgatgaaataaaaggtagtcagaacaaagattttgagtagatttagtattaatacatatttatacctaatcttagtaaatatacaaacataccaaatgagtcacaaactcagcattcaagagcagagctaggctgacacatagcacagtaaagtacttaatttcttatctggaaacttccaaattgctaggagaaattggcgagcaatccttcgagagagattgaaaacttcctgtctgaaaacagaaactattagcaattattttaacccgatagtagcaacccagggttcaaaagaattctgtatagacatctgtataatggaggaaattttcattcattgcacacaatagggtacaatttgatgaaaactaggtggattttttttttttaatttctatcctcaactcattccacaagtttttcaggcagcttagaagactatatgaagccacaaaaaagttagtaaccagcaaaatatcaagatcagagaaaatataaattaagacagaaaatcttataccaagaagaaagctagaactgagctctgatcttcctggtggctgatgtaaaaaccaaaatataattaatcataggctcctcattgttcatagagaatatgtcaagacagatatgatttaatttttattatccataatgaaaaattctaataatcgtgaagagccctttttcatttagttgtttaggtataagtagactcagccttccatgttttgaggaacattttcgctaggggactttgccagtgggttaataaagtgcttccagtgtctttcgtgtacaaggcattttgctatagagttctcatgcaggcattccatcaaaagatgggtgaagtctgagtgcactggctcattcctgtaatccccatactttgggatgctgaatggggaggatcacttgagtccaggagtttgagaccagcctcagccacatagggagaccctgtctctacaaaaaataataagttagtcatacatggtggcgtgcgcctgtgatcccagcttgaaaagtttaggtgagaggatcacttgagccagggaggtcaaagctgcaatgaactatgatcgtgccactgctctccagcctgggtgacagagcaagatcttgtcaaaaaaaaaaaaaaaaaaaaaaggtgatgttgtgttacccactagggagaacgttgccaacttcagctgcatctacttattctcacaaggactgtccttctttgacaataactcaaaaagacttatttttctggcagtttgttctgcaaggtgatagattccattgtattccaattttgtaatgaagtaatagaatttgcagtaaaaccaagttctctggaattctttggtaaaacaatgattgcttaaaatgggaaaggcttgtttttcaaattctcattctcaatataagcctcaacctctacccagggaggcattgtgcttgcccatcattgtcaatttttatgttctttggttataaataacttctggaacaagcaccagaccacatttcaatagcaattttcaaaacggaatgcacatttttaaaaactccttcgtgatcttttctagtaaggaggttttttttgtttgtttgttttgttttttttctaattgtaattttgtagtattgtagatggtattgtattgtcttggacctgcatagctaaaattggtgaagaacctttccacaaaatattaaggttactaatgatttcctggacttttcagtaaataactcaatatatttaaaaacctccccacctctactacattttatttttcagctctgatattagtttctccttgtctcagctgaacatcagaagatagacaaactgctgatggtttgttgataaatttaacacggttaccaaaaaaatcatgaaaaggccaggcacggtggctcatacctgtaattctaacactgcaaggctgaggtgggtggatcgcttgagctcaggagttcaggaccagcctgggcaacatggcaaaaccctgtctctacaaaaattagccaggtgtggtggcacacacctgtagttccatctacttgggaggctgaagtgagaggattgcttgagcccaggaggtcaaggctgcaatgagtggtgattgcaccactgcatttcagcctagacgacagaatgagaccgtatctcaaaaaaaaaaaaaaaaagaaagaaagaaaagaaaagaaaatcatgaaaaataccaaagtcttcaagttgaaaatggttaaattaaaagatgttttttcccctttagtcaatgtctaatgctgtgcttagtgtctgttaagcagtaggtaaattgtgtatatcccctatatcctgttgatcatttttagacctttttggaataggtttctggtttacttcttgctctcttttcccactgttactatcctatcagtctcccagtcagtctctctgactgcagtttttcacactttcaggcagatcttcccagtgcatccttttcgatctgaaactctcattcacttactttagtgcagcatcagccatctactcacaaccatatggctgcaaacacttcctcccggctttcctgatttgctgtgatctgcatttattctactctacaattttatttccagctactcctcaacatgaacctctgaacttctcattccccgactcataaggcaaggcaccactttcatgcctttgttcatgctgcccccaccttttcttgaaatgccttcgcaacgttttctctgcccccagcagatcatgatgatgcttatggcacagttccagcgctgacttctccatgcacctttcttggcctcatcacctcagactgacctctgcctttttgcaactccaaagtcagtaaccttcgtttctttttttaaatgacatagttcagcactgaactgccttgtttcatgaacacagatcttatttctccaacttgtttgaaagctctttaaaggcaagaagcatgccttttacttctttagcatccactgcaactcctacccccatactgactacagagttgtccaaattcatcactctacaaacattgcctttattttcctgccctttagctttgctgtctgccattcctgataattctgcttaagcctccctcaccttctccctgaggttttctgttcccccaaaacagaattaatctgtcctcttctagtcactgattggatttgtatttttgttatggtacttttatggtactttttgtactctccttcataatgtggttatttacatagctgtcagccctattaggttataagcccttattaggcaaggaccgtgtcttatttatctttttgcctgccattgtactaaggtacaggcctcatacatactaatttttcaacaagcatttgtcaatttgaattgcatattagatagtagacaatcagacatgacctagtgttgttagggcaccgagtatggttggtatatggaagtccacttacccgccctgtcctcttggggtacctagtacctagcgacagttcacctggttcacatacgaccacctgaaggggttctttcatttagaacttaataaagacaataaaatgctcggtaaaaatgactaaagctatactgtgaagttaaaactaaacaattaagcatagtttctctactatgtgtacagaaagctgcaaagattctgcaagaatgttgagtaccaacttgtagtcccttgtctttgggagttggtagcatatttgccctggggaagttatataagggaagtatctctgaggcccctttattccagggaccttccttctgcagtactggatagttcacagatccagtactgttttatttctcaggccactctgctggaatgtttcttcctcatctaagaccatttattcaagagcagagagttcttggtctttgtgtctgcattttcccctaaactctctgttaaagtactgagtgtgaatttcttgaactcgtctctcttgttcccactagccagtgcataggtgcatgcaacaccagctagaagaagggcctcctctctcctccagttcaacctgctgaatgctacctgtcatcctcaggactgtcctcttctgcactgtgggtctctctgatctttgctgtgcagcactgaaggagtttgatcaatattggtgggagaagaagagctttcaggatgattctgggaggaaaaaattttcccactgaatggacatcctgcctgcctcttgtattttgctctgaaccctttacctctgtcctcaggcccttgccttcatctggacttggatttcactctatgcccatcatcacacccagccatagacagtataggtctatgttactcaaacatttgttaatttatttcaaatccagccatttggataatatatgcatatggtttgtgaatttatctataatgatgcagcatgagaatgataacaaaagacctatttttaataaatttgtcttagctttaaaataggaattattccttttaaggcatgcatctcatagaaaagcaaagataatgagaaaatagaatttttaaaaaatagctaagtaaaaggaatagctgccttattttcctcgttgaaacaacaaaagggcatcctttggccagagagctcatattcagcttttgggagggaatagagtgttttgtctctgaggggtgacttttcacacctgtttaggattctaaaagtttgtggtgggttggctcgttttgttgagagtgccggccttgaattttggtatgtgggtcagctagcagaggttgcgacagtgctctgtgatgggtgaccgtccctagccctggccgtcttgaagtgggtactgggtcataaagaggaggggcaacccacagccatcccagctgatgcgagttcagagccacgcagcccagaggagacagcaggtcaggagtgtcagcctcatatgcaaaggacagcagtcttattcatgctgctgtctgaccaagaaaaccagaactgactgtcttcttgttattcccaaacaaggtgatgcctctgagtaaacacacttcttgcaggcagaagaaatatggaggaatacaaccaacatgattcctatatttcatttcagccaatacctttagttgtcccaaagttcttactagagcatttaattcctactcacttgaattaattaagttttatatttctatccctttttgaagagagggattacaacagcaaattggcctcacccaaaaaacaaagggccaggacaattccatatactgaagtgttctcattaacctgcattgtgtgattccttggctgagtgcttgcacattctgagtgcataatcttcatggcagctccatgagttaggttattatactcactttcagaaaggaaactgagcccagaaagaataagtattgtgcttgaaagcaaatgtctagtaaggagcagctctagaattccagcccaggtagtcaagcttcatggcaccactcaaaactgcttattgtacgccagctctcgtatgagtaaccacctcctctccttatattccctaatgaagaatcaaggtaatgatcagaataaattaacttatagcttctctgtcagacttatttaaatcaaggtttcatctagttacttttttttctatttgtttggtccaaaaaagtttccaacaaattgatgagcagacgtggcttctctctttgaccgccttggatctattgatgagctaattcactggaggaagggaagagaaaatccaaggtttggtagtcactgctttagtaatagttgattgtatgtgttttgatgtcaattcaaatgaccgattccatcaccaagcacttgaagacctaattcctggcactaggctgacatctttaacaacagacctcagaggaatcttagagatcatccaagagatgttcttgcttgaaatgcaagtctcagcttcgccagtggatcatggcccagtgactttgagcatgtggcctgacttctctcataggacctcgaaagagctttggagagaaatcaagataatgtgctggagagaacctagcattctcagtaatttttagttcaatctaaatgcagagacagaaagagagattctttttttaatgtcttcaacctcagtgatctgctcatccaacagtgcctaccaacacttctgctgggcatgattattagttaattagcaagggctttagagccagtccaaccagggttcaccacactttaccagctgcatgaccttgggcatcttatttagtgtctctaagccttgtttacttcagtgtggataatgaaatctatctcttaagtttttattgtgactaaattagataacatcagtaaagtgctgttttattccaatcaaaaccctatttcctagttccaaaggttaaactaaaaataaccttttcctctgccataatgacctctaacacacagaacacagaattagcagataggaatcaaaaaagcaagccttgctgtcatctcctgccctgtgaactgattggagaggaagggcactaccccaggaaagagtatgggcctgtaccactccaaactccaaatggggttgttccatgctgatgggaggggtgggtatcgtgtggttaccatcaaggccacaaaagtcaaacgaggaaagcagtgctgtaaggagtagcacaacctagggtgcatgtcttgtgacaataagcttcttctgtggaggaagctaggggtaggcatagctcttacctagagccctgggtgtttgctggtgaggcagcatgtgcacaaggggcccaccataccttcagagacttccaaccattcgtcatcttctaattcaaaaacagcatttgtacctgaagttaaattactgcacaaggcgatatcacctagaaggcctacaggcttcacaaatttaggagactggtgatcaaagagaaaaactcatactaatatagtctctgttggggcccctgggcctctcacaggaaatattctttttgaaagaacacagttggctgggcgtggtgtctcacccctgaaatcccagcattttgggaggccaaggcaggcgaatcacctgaggtcaggagttcagagcagccccggccaacatggtgaaaccccgtctctacaaaaaatacaaaaaattagctggatatcatggcatgcacctataattccaactactggggaggctgatgcaggagaattgcttgaacccaggaggcagaggagcatgtgagctgagattgccccatttgcgctccagcctggatgacaagagcgaaactccatctaaaaaaaaaaaaaaaagtacacaattaataaaagtacttaacactaatcatgggacatagtaagtgctcaataaataatagtggttattattggttttgatagtgattattaatatttaatgtcacctatcaaatcattattttagggttaatgcaggtaatcttaagctgtataactctgtaaaaatatgcatatttttatatatttatgtacaaatatatataggtatatagagatttataatgtttttgtttttaaaaattccgaaggtaaaaattcaagctgtatggtagggtttaaagtgaacttaaatctgtttccttcctctagtatatttaggtatattgatgcataatagattctcagtaaatttaacacaatttcaaataacatactagattattgtacaatgcgatcttctgacttaatgatttcacattttattagttggaggtctgtgccatgctcctgggctcaagaaattctcttgtcttagactccagagtagcagagactataggcatgtgccatggtgcctggctacatgctcttctatttcacaaatgaggcatgctttttaaaaacatgtcttccgtggataacatgtatctgttttttataccaataccatgctgttttaggtactgtagctttgtagtatattttaaggtcaggttttgtgatgcctccagctttgttcgttttgctcaggatttgtgtgtgtgtgtgtgtgtgtgtgtgtgtgtgtgtgtgtgtggctatttgagttctggttccatatgaattttagattttttttctatttctttgaagaatgttattggtattttgacagggattacagtgaatctggagattgctttgggtaatatggtcattttaatgatattaattcttctgatccatgaacgtgggatgtctttccatttgtgttttcttctatttctttcatcagtgttttgtagtttttgttgtaaaggtctttcacctccttgattaaaagtattcatagatattttattattattattatcttgtaactattataaatgggattgctttcttgattcctttttcagcgagtctattattggtgtatagaaacactactgattttgtatgtttattttgtatcctgcaacattactgaatttgtttatcagttctaagagttttttggtggcgtctttaggtttctatatatttaagatcatgtcgtctgtaaagagggacagtttgactttctgatttccatctggatgccttttatttctttctcttgcttgatggctctggctaaatctttcagtatatgttgaataacagtagcaaaagtgggcatctttgttccagttcttagaggattcagtatgatgttagctgtgggtttgtcatacatgggctttattacattgatatatgttccttttatccctaatttgttgagagtttctatcatgaagggtgttgaattttgtcaaatgagtcttctgcatctgttgaaatgatcatatggcttttgtctttcagtctgttgatgcaatgtgtcatgtttattgactggcatatgttgaatcatccttgcatccctgggataaatcccacttgataaatcccacgtgatatttgatatgttggattccatttgctagtattttgttgagatttttaaattatttttatcttttttagagacagagttttgatctgttgcccaagctggagtgcagtggcatgatcatagctcactacagccttgaactcctaagctgaggtaattctcctgcctcagcctccctaagtgctgggattacaggcatgtgccaccactcttagccttgttgaggatttttgtgtcttattcatcagtgatattggcattggcctgtagttttctttttttgctttgtccttatttctatttttactcctttctcatattaatgagtgaagagataggttgttcatctttttcttattaacttattagagttctttggatatgaaggatattaaacccaagtcacttatgtgacaatgttttctttttgtcattttcattttgactgattattgtatttttttcccagacaaatgtttaagatttttatgtagtcagatttatcaatcttttcttttcatggcttctgaactttttggcatgctattttaaaactttagcatagtttctgttagtggtagtagaggtgtgtttatatacatatatatcttttaaaatatatgtgtgttatatatataatattgcctttaaatctcttcatctataatttatttttatataagctataagactgagtgcgatggctcatgcctgtaatctcggcactttgggaggctgaggtggatagattgcttgagttcaggagttcgagatcagtctgatcatcatggcaaaaccccatctttatgaaaaatataaaaattagctttgcatgatggcacatgcctacagtcccagctattaaggaggctgaggcacgagaattgcttgagcctgggaggcagatgttgcagtgagccaagatcgtacctctgcactccagcctgggcaacagaacaagcctctgtctcaaaaaaaaagatataaaatagggatctatttttttttccagttggctagctcagtttcccaacactattaactggataatcattcttttcccattgatttgcagtgtttcctatatcatgcattaatctcccatacagagctcagtttgtggtctccttgtaatttcattgatctgcgccagtaccaaacatgtttaacttttgtagttttatatattttcatatctattaaaaaggctaattctcttttattcttcctttaacatttttttctaaacagtttctggattttaattttttcagtcaacttgcgtagcattctgtcaagttaaaattgattttattcttcactggtctttcctacataatttccagcaacccctggaggcaggaagagtgtacaccctttgggtgaagtctgggcagtattggggtctccatttaaggttctcttcttccccctgaagccatctcattgattctttcattcagcaaatagttttgagctcctatgaagctttgtgctaggaactctgaggaccacaaaactggtaagacatgactcctgcctgaaatgaagtgtagatgctttactgtggtttccattgtgtcttcagccacctctgggggatctccttctgtttttgatggcatacctggattcagttagccatgcatacacattcccttaatgagaaactttagccagttttttaaaaaaatcattccaaagagttatttaaagatattttttcatcacacagttcctgggactacagaaatgacatgggcgaggctcaagtccttttccctactttcttcctgtcttctaaaccaagctatattattcttttttatgtgacagaaggaagtcttttctttttttttttttaagacacaagtgattgcctgaagctacttttaggggaaacatatatcctgttgtcgtatctctctctcaagaatctgactctcaagaaaacagaccacaatgtaaaagtagtgttgggtgtgctgctttgtaaaccactctgggggccatgtgagaagaaagcgtctctcagtcaatcacttttccagaaaagtcacagaagtccgtgttttcaggcaatgatcagcgcctcatcagtatgcagcactgcttctaccagcagcatattcaggattttctgaacaaatactgtgatttccttttaacgtctctgctgaaactagattagtgcagcttgagcagccaccctggaatgaagaccttgtgccgggtctaatgctgccaagtgcaactgccgggatcagccagcgggagccaccctgtcacacacctgtcatgtaggttgatcagaagctctcatgaagttttgactaggcagggtgggtttctagatcagctgctcagtgtcccatgttgttattctgtgacctgtatatagtaaagcttggttgctggaggccaccttctcccagtaggtgatcactttcgctttcccagaaggaaagtgagctccacaatctcactgtccctactgttacaataaagttcttgttggatgcaaaaatgatcatgggtgttttcaacttctgttactccttagtctcacagaaggtttttgatttattgctaattgtgcttattgatatagcacttcttacatacatgtaaaatattatgtgctgattatcacagcagtttttgcccaaaagcatccatatcaagtaatctttgttttttgttctttcccaatgtatatgttgaaccacgtgaaattacaattgcaatgtttgcaatttcatgattcaacctaacaaaaggaatctaccctcttgctaccatcattaccactggtttaacttgcaaatctgcttgtagctcacatctcagtttctcctttctcagaagtggctaaatggccatggctggtacagatttcctttccatctctatctgggcctttttgtcacctctctccttgtacttgtggggtcaattaaaattcttctgctgttatctccattcatgggtctcctcagactagcaattaaaagaaacctgtctgaaatcagggcaattatagcaaaaactagccagcacaacaggaagggtgagattggccaacttttataaattaatattacttcctgttaaatcaattatgtaaaatagttgtaatagaacccattaatttgtattccatttatgagattattcaaagcctgtgctttagtttgaactatactgtatatttatatatagttataatttaattacaagaaataatctgtaaataagtggtgtgaacataatcggaggcattatcattttagagaaaaagaaaactctcagtgctaccttagaatcacctaccaagaactaaaatgctgaagaaaaattttgtggttagagcagaaactcaaagaaattcacaaaccaaaaccttggtagcctacagataccatgtgaatgcagaaatagtgaacatgtcttttgaaaagcagtctgccattcacttcccatgatctcagactggcattttaaaaaatacgtctatcattgtaaattagtgagattctggtatttgattaatattaacaaaatactgaggaatgttattttgttttactgaaggcagctaaaatgtttgatgttttaatgtaagtttttgcaccagattttataggggaaattttaaaaaatgaatctaccacacccttgctccccatgtagtgacctatgagggtgtgtggaatggtgtgtgaggatgttcttgttgcctgtctgagcctcagatgcctcatccgtacagggtggataatcataacttacttcttagggttgatgtgataataatatctataagttagtaagggatgagcaaacattcattctcttccgcttccctttaacagccttttatgaacatgctcctttgctacccttgacgactctttgaaacctaaaaaggagctttagtcagattaacagctggggctgaattttaggtcttccatccaataagagtgagctgctgtgattgtaagcagaacttgtcttattttttcagccaacatttttgaaaacctatttgtgagaatccatgcaagataccttagagaaaagttatctcggcgatataatttcaagagttcctcactccaccaacgtgctgggaatgtatacttatcaagcgctctggattaaggcattgaagactgtaattaaaaaaagaacaaaacaaaacaaaaaaactcatgagggtgaggttgctaacaattagcgtcacaccaagtaaacacagcaaccttggtcaagtaaccacccgagaagaacttaaaatcatggaacaaagaagagagagattctgatgggagtgactgtgtctttctttgaacaaactcgaggtcctgccatgccaggcactgtagggcctatgtacttggagacgcagcctggaccctgctaggctaggtgccctagcaaagagttctgggcatgtttgataaagggggtgaaggaaaaggaagcacatttgcaagaaagggaggggccagcctgtcaagataaagatagcctaatgacaaccttgtgagtgagttatattcactcatctacccggggaaatctgggaaagtcaccaagaatgggctgtgttccttctgcaatgtggaaaaatgcattgtcaagtcattacaaacaacagagaaaaatgggcacaaacccactgggagtgatatatttctctgaatattccatgatcgcttagtccacttaatgcaacttttttttttttttttttttgagacagagtctcactctgttgcccaggctggagtgcagtggcacaatctcggctcactgcaacctccttctcctgggttcaaacaattctcctgtctcagcttcccaagtagctgagattacaggcatctgccaccacacctggctaatttttgtatttttgtagagacggtttcaccacattggccaggctggtcttgaactcctgacctcaggtgatccgtctgcctcggcctcccaaaatgctgggattacaggcatgagccaccacacctggccaaatgcaactcttaaaatgccaaatttacaccaagattagcgttcgtttatctaatccagaagggaaactgacattttgaatgtctactaccgcacagcccaatatggtagccactagctacaggtagaatttaaatttaaaataattaaaagacagtaacactttaaaattctaaaaattaaattaaaaattcagcatagtagtctctctagtcacatttcaagtgctcaataaccacatgtggcttgtggctgccatattagacagtgtccatgtccatcattacagtaaaagttccattggacagcgctggtttagtagtatcagcattactcttgtacactatgttgtacatgtgttatcttattgattcccaaatctatcccaaagaaggacttcattctcattttgcagatgaggcaagaatccccagaaaaataagcagttctctttcatgtagtggccactccagtatctgactgatgctcagcgttctgtgaatggacagctaagctaggttgtgagagactgggattgttggactaggaagcccagcacttccaacagtggaaagattctgttccagtatgatcacattttattttatttatttatttttttgagacagggtcttgttctgtgtttcaggcagagtgctgtggcatcatcatggctcactggagcctccacctcccgggctcaagcaatcctcccacctcagcctcccaagtagtggggctataagtacacactatcatgcctaatttttttttaaaatttattttttgtagatatggggccttactatgtgacctaggctggtctcaaactcctgggctcaagcaattctcctgcctcagcctcccaaagtgctgggatttcaggcatgagctaccatgcccagcctggttgcattttaaaatcaaacctttgtagacccttgcttctccttgctgtaattttacgatttgcctaaatactaaaattacttatacagtgagaaagtctatttcagttttaaaaggacaaggtaagtaagtagatgcctagtcccgagctgggaatggagaatggctgcaaataggcacaaggtttcttttgaggtattggaaatgttctattagattgtggtataaattatgttctgtaaatttattaaaaatcactgaattgtcacttaaaatgtgtgaattttacatatgtaagttatacctcaataaagccatttttttaaaaaaagaacaatatataaatcctaaaactctagggcagccaaaaatttaatgtgaaaaagctgccaaacctttaattagtgggtcaaagtttaattgctggtattttccgaatttcccccatgatgttgaaaaagaaatgatgtttcatctggagccaagcaccaggaaactctacaaggtatacattattatctacattttctaacggaggaaattaggatgcagaaggttaaataacttgcttaagattcacagccaactagaactggtgacagtgtcaaacctaatactgtctggatccaacagccatggctgctgtcctgttgatattatgcaccctctctgtgtgaatgagaagaagcccttacattgtttcacttgagatcaccttccttctctcagaagacagcagctagctgattttccagtgttactatctgcattttgcattttgtacttgagaagattccctaaagggaaaagagtctagaccaaaatacctttctttttttttttttgagacagggtctggctctgtcacccaggctggagtgctgtgctgtgaccttggcttactgcaatatgactttatcactacatggtatgacttgcagaggtgtctgcataagagcttttgagggactagtccctgtcatgtttcttacacgtgggttaacagctcagttttagatcatttgataaattgggtagctcgctcctacctgttttatgaatagaatgctagaaaattataagctcatggggcttccatcaggtcttttcagctttggccaggcctagtaacctttacgtcttcagttatgttctcttagcatctaacattctttccttcttgccatctctctctctttttgatcattaactatttagccagatatctgggtgacgcctctccaacctgtcctgctcttactaagccttgcatggccacttgcccttcctggatacttccagtggccaggcccagggagtttccttctggcctctctagctcacttgctcttccctctgtgcctttgtaaataacacagatcctttcctttatcttttccttcctttttttctgggatatgttcaactagttgaaacaaaataaaccaaaccaaaccaaaaataaataaaaacaagaaaccaagccagtaccaagccagcagagcatgtctatgggccacatgtgggctcttgaatgttggacttctgctttttcatatacaaagcaatgtagatgacattaaaaaaacaacaacaaagtaaatgttgtaatgatataaactaattatgaaaatgggtatcacagtgctttatttttccctctaccaatatccttagaaacagggagtaaacaggaacttctgcttctacatatttggccatagtagagtttattagatttgagattcttacagtgtcattcacatttcaacataaagttcatttgtaggagtccctgagtcacttcttgtgtactcagagataattgaatcccaggatttgaaaagttgttaaggtactttcaggaaatcagctgtcttctagtggcagtagtggagtgtgtattcagctgcttgactcactacctcagcaggcagcttgctttttttgtgaactgtaggcactaaccatccccaggacatgttttcaaaaccaggcaagtgccttcttcctgacttacgtaccacagtctcacttgggttcctgatgtcttcacagcagccagttcagctcccttagaatggtccatcacacatcccatttccagcaaagcattgcctaggactaactccaaactgtttttgtagatattttagaaacactgggtcaggcacagcggttcacacctgtaatcccagcactttgggaggccgaggcaggaagatcacctgagcctaggagtttgagaccagcctgggcaacatgacaaggccctctctctacaaaaaaaagaaaaaatgaataaaaattgaaacattgtgtttttttttctcttactctggattttatgcagctatacctaaactcagacaaaagatgtattctgagagaactctgctttaaaggacttcaagatagctctctttttaggcaatgaatacgtctatgaaagtcaccctgcacttactcgttttgtaggtccaaagtttttccctagtagatttgcacagaagaatttgattataattcagttaacaaatacatttcctctataaagggcactttcagaagcactatataaagttcatggatttggacacattgcggttatcaggtttatagtacatcttctatgcagtaaatacagtaagaaaaatggctacatttcaagatgggttattgtgcatatataatcattgagaaattaatgctttttgtttttatcaatgtgaaaatgtcagcactaggaaatgaggatgaaaagttgatttattgtgtgcctattatgtgccaggtcctggagtagatattttaatgtcacatgcagctcagtgtgggatgtgaatctgctggctctaaggctgaactacctgagtttgagtctcagccttcccactgctgcaaggattcagtgagataaagtgtccaaaacatctagcccatgctggtgtgatagcaagaactcagtaaatattactgctcattatatcttgttccatttaatcctgtgaagtaggcactgtccctctttaatagacaagaagactgtctcagagtggtccagtgacttctataaagttttctgcagtatgttgcagaggcaaaatttagaaccaggacttgactgggcactctgataaaaccgctaaccaggagttcttgttctaggctgccaggaaaatctatgctacccttgctagaatgatggcctctactgagagacaaagttgcccttaaaggcaacaaattcacaagtcaacatttctacatgtagaaaaactttcaaaggaccagattcagcagtcaactatttcttaaagctttttccccccctcagtggacagcagattctcagctatatggataggtctatgtttttcaaaacctgtgcatgatttatgaaacataatcaaatacaccagtcctcccaatacctctgctgtgtaaatgttaccatctatgcaaatatcaacttttaatgccagcttaaggaaactgtaaggatgatgttcctgtagcagccataagacaaacctccagggttttttgcggttggggaggcaaggaaggggttgactttttaacttcgccacatcagtcagactggatttcagaacttttttttttttttttttttttttgagacggagtctcgctctgtcgcccaggctggagtgcagtggtgcaatctcagctcactgcaagctccgcctccggggttcacgccattctcctgcctcagcctcctgagtagctggggactacaggcgcccgccaccacgcctggctaatttttttttttttttttgtatttttagtagagacgggatttcaccatgttagccaggctggtgtcgaactcctgacctcgtgatcctcccacctcggcctcccaaagtgctgagattacaggcgtgagccactgcgcctggccttttttaatttttttatttttattttattttattttttttttgagatggagtcttgctgtgtcatccaggctggagtgcaatggtgccatctcggctcactgcaacctctgcctcccgggttcaaacgattctcctgcctcagcctcccgagtagctgggattacaggcgccccccaccatgcccggctaatttttgtatttttagtagagatggggtttcaccatgtcggccaggctggtctcaaactcctgacctggtgatccacccaccttggcctcccaaagtgctgggattacaggcgtgagccaccgtgcccagccttcagtgctgtttaaatagctcttctagtgtgggcttcaactgagaacatccctgttttcatcctcaaggttgtttttctgctcagtgttcttgttgaccacgtctgggctgctgcaggacaatgattgaagttttagtagtgaaagagttcaatagtgttgacattgaaactggaaaatcattttactaatgtaagatgatgctttactatattgaaatcttagacaaatagatgacccatagcccaaatacaggtaggatttatcttttgtaataagctgagtctctttttcctttagatgtatatgcaaaagagaagatggatgaaaactaacgtttcacaagtgatatgggcttaatatagcacaaaacaagaagaattggtgctgagtatcacataattttcattgcagtttacttcctagcacttaatctagtcaaaatatttttcttcacaacattgctactttccgaataactcagatgcttaactatattctgccatctaaatttatatctgcaataaggcatggagtgtgtgcatcaaattttaggcaaatgaaaaagaactcgccccaggatactgttatggatgtgacaatttaagaagctacacatcatctgaaactattctattttctttgccagggttcagcggattcctacacaagcaggccgtctgactccgatgtctctttggaagaggaccgggaagcaattcgacaggagagagaacagcaagcagctatccagcttgagagagcaaaggtgagtctctttccttctctttggctcaaaagtgggtcgttgctcagtggctaccagctgctcttcccttacctcacatttctggaataatcattttgtgattattctaacaaggctccagattgggaagctctctgatcctttcacctctaagtgaggttagtaacatctccaaagaggcatttcctcagaaccttcacctttttgtatttggtttggtggtgaattattggtcgtcttccaacttagcaatatcaagcctcccatgcccagtgttggcagacagccccccaggcaccagctggccctgcctattcctggcccctcctcatccattacttcagcctttattacaggccacacgtgtgctgttgttctgtggatcgccctgtttgtttctctactcttctctctcgctttcagtatcccacctcaagttcagtgtgaagttcaggactttgaacaactctgagaagtgcagcaaagacaagcaataaaggccattgccaaaatagaccttcagatattccacaagaagaggcctccatagaaatcgctgcatccacaggaagcagcaaggagccaactgcatggttgaaagttagaaccagaagagtcactagggatctcccattccatgtgcttccaactttgttttgtttgtttgtttgctttttgattttttgaagcacgaccctttttgtccaatgaaattttatgcacaatagcaaaatacaagacaaggtcatggccggcctgtcctctttgccctacgtgacagactcctaaggtatattggttcagtcttctgatttttagaagaagaaaaaacagaagcccaaataaagtgaattccttcccttttctatttttattgtaaaatatttagaggtgagaggctgtgcatggtggctcacatctgtaattccagctacttgggaagctaaggtaggaggatcacctaggcccaggaaataaaggctgcagtgaactgagatcacaccagtgcactccagcctgggcaacagagcaaaaccctaccaaaaaaaaaaaaaaaaaaaaaaaaaagaggggccggtgcagtggcttacgcctgtaatcccagcactttgggaggcactttgggaggccgaggcgggcagatcatgaggtcaggagttagagaccagcctggccaacatggtgaaaccccacctctactaaatatacaaaaaatagctgggcgtggtggtgtgcacctgtaatcccagctactcgggaggcagaggcaagagaatcacttgaacccaggaggcagaggttgcagtcagccgagatcacaccattgcattccagcctgggcaacagggtgagactccgtctcaaaaaaaaaaaaaaaaaaagatgggaggagaatgatgcagtcaaattaggtgtcttcatttgcctcaacacctatgatgtctgtactctgttggtggaaggggcttttcttgcagtacatgtgaagggacatcagtgaggtttcagccttaactgctgttccccagtcagattcccagcacaaatacataagctggtaacaaagcagctcagaatatcaggaatcttgtgtctcactgtggctaatttttgttacgaaattttctttcagaatctgttttgtgaccagtgtggtcacccgaatttgggtggcagcaccgtttgcttaggctggtggtttacgtgtccccacagtgctgtgccagcctgagagcactttgctgagaggcatttgtgtaaaaagagtttcaaaaccagcttcgttagctagagagaaggtgatctgtgaagagccctgcccatcagctttgacgctgactaacccttcttttccccggcaggaccagatattctgttgtatagaatcccacacgttttcagatctggactatttaaaaaatactattttatcctcttcccacctttttttttttctttttaaaaagaccttgcacacatttcctgtattccaagttaagaagctattggttatcatttaaaataaacacagattttaagattagagaagagactgtcctcccctgcctttgtctatccctcttaatactttagagcacattttaaaatttggaatattggaaagtattgcaggaaaggaaaaatggttgggctgataggaccaatcattttcagagtcatctctgcaggtttcttgatattgcttgagaatgtaaaactcatttgagatccctctttggaaagttatttctcactacctggtactatcagagtttcaatatgaaaaatgctcctctctcctcccttcctcattccttattccatggttctgtccctagtccaaacctgtagcatttgccgtgaagacaaatgtgagctactgcggcgccctggacgaggatgtgcctgttccaagcacagctatctcctttgatgctaaagactttctacatattaaagaggtaaatgtagaacatactgcatcccttcacctgccaaaaagctgaagccaggaatcagctctgagccaaactagccagagaggagacccaaggagctgccagtgcagtacatgatttaatttgctgagcctcccaaatctagtcattctcattaagattgagaagtctgagatcattgcttgcattatcacacactgacaacattaaatcacagtcaaccttaaaattatagcatagatttctgacagacctctatggtcctctgggcacctttaaatccccttctgtgactgcagagccataaatatatggatccaactttggaaaatgtaagtttggtgtcatggcacctacccagaagggactgtttacaggggatgttgtaattatagacatgtagactatagtgctgtgcaccttgaccatggaaccaacactagagtgtataatcattcaaagaaagatttacagctaagaaaagggcagagggctctgggaaacagaaaggcaaaagggtaaagtgtttgagtagccaagaagggtgggatccaagacccctagtggagggacagacctttgatagaaagaagaatgctaattcattgtgacatgcagggaaaagatgagtgcaggcacagacacttcagggccttgggaataggaaactgaggacccatcaacttcaaccatggcctctactttcttgatggtatatgaggtgaggatgtctacatttgtctagaagacaagaactcttgacctgaaacatgtgccctggcatctgaatggttaagttgattatgtctcaccatttccatcaaaaatgcccaagccatattcattagttgctaatacccactgtgtccaaggagaagcaccacttgaaaaggtaagagatgttcttacatgtgacatgcacactcactcacaccaacattccaaccttgtatttgattgctttcctgcattgtatcaaggtctcaatttgtcctggctgctgtttgagctatgtgcttgttgatcagtgattttctcttcagtctggcagtttgatgtgacattgagctggtaatcttatgtggaccagagcctcttgttttcatgtcttgaaattatcagataagaaaacatctttgatatagaaagtgctaatcattttagggaaatccaaatagagaagggttggaacaacaccgaggtgacctctgtagagagctggcacaagttcccagaacatcaacacaaatgaatacatttctataatcaagttatagccttccctctcatccatcacttagaaggccatctattatgcaccatgttaagtagtttctcaataataaaaaaaaaaaagcttaaatgcagagaaaagctacaactatgcttgtcacataagccaaatgatgatcaaattaagctcttgattttacatagtgactttctccctagtaactcaaaaaattcattcctcctgagtcagattctcactgtgctttcgctgtttcctagaactaagttaaaacattttgggaagttgaattaaccatttcagcaagccctttaaagtcatttgggtgccatttaacaaatgagtgttccagtgggctatgccacttcatttcaggaagtaacttaagccctaggaaactatgactcatggtctgttttgtcctcaacacagtaaaatttaaattccagacctatgcacccaagattctaaaagggtccctttgccctttgttaattccaaaataaacagacctattattttaggcctgttatactaaaagacaggaaagtggggaaaaacaactaagacctagattgttcaaggttttatatcaggtcaattcacatttttttcttttcttttcttttttatttttttggagacaggttctcgctctgttttccaggctggagtgcagtgatgcaatcacagctcactgctgtcttgaactcctgggctcaagtgatcctcccacctcagcctcagcctcccaagtagctaggactacaggtgcactactacacccagctaattgtgtagtctagtatagtgcactacactagctaattgtgtagtacactaggtaattagtagtacactactatactagctaattgtgtagtacactacactaattgtatagctagctaatggtgtagtacactacactagctaattgtgtagtacactaggactacaggtgcactactatacccagctaactgtgtgtgtgtgtgtgtgtgtgtgtgtgtgtgtgtgtgtgtgtagacagggtcttgctatgttaccctggctgatttcaaactcctggcctcaactgatcctcttacctcagactccaaaagtgctgggattacaggaatgtgccaccatggccagccctcaatttacatttatttcaatgcaatctcatactttatgccactcatatagtatgcatggagaagctgtgtgcataacaaaggccaaattcttaccagaacatatttctcatgagtgtgaagctgttactcagaataatttaaagtttacccagaacttcatggtgtgattattcaatgaaaccttccattcctccttcataatgtatcagaatcatatatatatatatacacacacagacatatatataaatttcgcttttctatgagctcagcaaaatatactacatatcattgttacattttgaaaaaagtatatgtttataaatatatatattttgggtcaaaataggagagaattatcttgcccaacactgataaaaacagtaaaggaagtttttagaatcatctccagagagtttaaacaatagagctggtatctattttgtagaagtgacctagctgaaacctttccttgaggcagggagcttgaactaaattgctttctgctgtataattcagcaaatgtataattagaaatgcaattttgccaatccaccaaataagcccacattgacagactctcaccccacactggttgaagccttctcatagacttgagtttgcttgtcatggaacttaacttaaatggaaattctggagttcctcttgggcttcagagcgtttggaagttatttgcaaaatttcacatacaaatatataatacgctcagactttgtaagtgtaggcatctttttcttcaagtagtaagatggaccttaatttgcaaatctatatttgaaagatcatgactcttccccagtgagattagaccacagatagtatcgtggaatttttaactgaaagcttttgacaaattatggactattaaatgtatttcatctcagacatatctgtcttgccttccagagttccagttacattggtgcatatttatccttataaaatatgttctttaagaattggttagagcttcttgacaaagaccaaaagaatccaaaggttaggaccagacattagtccagggattcacaaactatagcccacaggtccagtctgacccactctcttttttgtaaagaaaagttttattgaaacacagccatgctcacttgttgatgtttgtctgtggctgctttcacacaaggacagcagattcaactaattgtaacagagaccacgtggtctgcaaagcctgaaatatttactacttggacctttacagaaaaagtttgcagaaccctgctttagtctatgcatctacctcagatatatatatatatagtatgtatatatagatatatatgtatatatagatatctatgtgtatatatagctatctatgtgtatatatagatctatatatgcacacatacatatacaatatactttatattaatatatagtataggtatatatacacatatatacatacacaatatagtttatataaatatagtatatatagatatatacatatatacatatacaatatagtttatataaaatgtatagtataatatagtatagatatatagatatatacacatatacaatatagtttatataaaatgtatagtataatatagtttatataaaatatagtatatagtatagtatataaaatatagtatacacacatatacatataaaatatagtttatataaaatatagtctatagtatagtatataaaatatagtatacacacatatacatataaaatatagtttatataaaatatagcatatcatatcatataaatagcattttattcttcttgtcccctaagattaataaacaacgtgaagataagtgaattactattgatagcaattttatttctgaattccagaaatataacaatgattggtggataggaaggctggtgaaagagggctgtgaaattggcttcattccaagtccactcagattggagaacatacggatccagcaagaacaaaaaagaggacgttttcacggagggtacgttcccatcttttctatgcacttttttttggtcagaaaattgggtgatattttcaagggtgtatactttcaaagtagaagatacttttctgtgtgcaaagtgtttctgaaactgacacagaagagtttcagatagttctctatcctctgtgcatgctgaagcctaacaccactggagaccatatgaattccatggcagagactgttttctgtggcctcagcaagccctccttggaacccaagctttcctctaggagagtcacttcgggcattctttctccacacagtgagtgggagctgacctgaaccagcagtatggctcctcttggttcgcttacagagactctcccttaagtgggcacaaaatgtgatggtatcgcccctactgggaagtgaggagcccctctgcccggccagccaccccgtccgggagggaggtgggggagtcagccccccgcccggccagccgccccgtccgggaggtgaggggtgcctctgcccggccgcccctactgggaagtgaggagcccctctgcccggccagccaccccgtccgggagggagatgggggggtcagccccccgccaggcgagacgccccgtccgggagggaggtggggggtcagccccctgcccggccagccgccccgtccgggaggtgaggggcgcctctgcccggccgcccctactgggaagtgaggagcccctctgcccggccagccgccccgtccgggagggaggtgggggggtcagccccccacccggccagccgccccgtccgggagggaggtggaggggtcagccccctgcctggcgagccgccccgtccgggaggtgaggggcgcctctgcccggccgcccctactgggaagtgaggagcccctctgcccggccaccaccccgtctgggaggtgtacccaacagctcattgagaatgggccatgatgacgatggcggttttgtggaatagaaaagggggaaaggtggggaaaagattgagaaatcggatggttgctgtgtctgtgtagaaagaagtagacatgggagacttttcattttgttctgtactaagaaaaattcgtctgccttgggatcctgttgatctatgaccttacccccaaccctgtgctctctgaaacatgtgctgtgtccactcagggttaaatggattaagggcggtgcaagatgtgctttgttaaacagatgcttgaaggcagcatgctcgttaagagtcatcaccactccctaatctcaagtacccagggacacacacactctgcctaggaaaaccagagacctttgttcacttgtttatctgctgaccttccctccactattgtcctgtgaccctgccaaatccccctctgcgagaaacacccaagaatgatcaataaaaaaaaaaaatgtgatggtatgtgcaggtcccggcactgatagtaccttctccaccccaggctttttgtggcatctcttgtctcctggtatttgggtgaagacagcttcaggtgaatcaacctctagtgagctactgaagtaggcatgtagatctcagagtgcaggtatttaaaggtcccaggaacacaagcacagcttgacagaagagaaaccaaatcatcctgagtctgcatgtattgtgtcgcagcctgcactgaagcattgatttgatatgttacacttttttgaaagttctaaaatagaagcagctctttctcttgaccctcaacctctgttttctgttgaatgcttttctatttcaaaaaactcctgtgttctttaggcgcctacctttgtcataataagaaccgcaccaactgtaataggagatcacaaaagtatagttaccccacttttaattaccaatcttttttagcatataacttgccaatactattattaatattaatccctcttgtcccttgtattagtctgttctcatacttcttctttttttttttttttcttagagtctcgctctgtcgcccaggctggagtgcagtggtgcaattttggctcactgcaacctctgcctcctaggttcaagcgattctcctgactcaacctcctgagtagctggggttacaggcacgcaccatcgtgcctggctaatttttgtatttttggtagaggtggggtttcatcatattggtcaggctggtctcgaactcttgacctcgtgatttgcccacctcggactcccaaagtgttgggattacaggtgtgagccactgtgcccggcctgttctcacacttctataaaattggagaacttatgaggaaaagagctttaattgtcatggttctgtagactgtaaaggaagcatggcagcatctgcttctggggaggtctcagggagattttactggtagcagaaggccaagcgggagcaggtgtcttacatgcctggagcaggaggaagagacggggaggtgccacacacttttaaacaatcagatctcactataactcactcattgtcacaggaacagcacaaggagatggtgccaaaccattcatgagggactgcccccgtggtccagtcacctctcaccagtccccacctccatcactggggattacatctcaacatgagatttgcgggggacacagatccaaaccatattatccctttttttctaaaattttgtcttccatgcccctttttagacacatggggagcatgtgttcctgtcttggggtctttgcatttgctgttttttcttactggaacctttttcttcacacttacacccggccactccatctgctttatatctttgttaggtatcaccctttcagtgacccctttcctgccaattgtatttaaaattgtacccactccccttccctgtacttcccatcccttccctgacttagttttctctgttgcacttattactctcagaaatattatatatttacctatctatcttgtttggtataagctgagcatccataatctgaaaagctgaaatccagaatgttccaaaatttgaaactttttgaggactgacatgatgctcaaaggagatgctcattagagcattttcgatttcagacatttggattagggatgttcaactaagtatatagtgcaaatttccgaaatctgaaaacagtggaaatccaaaacatttctgctcccaagcattttggataagggatattcaacctgtactgatatgtcctactagtatatgactcaataagggaaaggattttgtctccccaatgccgctgtcttatttctactttccaaaacagggatgtacaatccatatttgttgaataaaataactgaattattatcattttcaaagttttattgttattattatttcttaattgttacagtcatgggccatataacttttttgtcaaagacaaaaagtaggaaggtggcagctcccgatggcatttgtgggcttcagggaagcttccagagcacacctgaggagaccagagttgaggatcttctatttaaataaataatatttttcgtgaccaattccctacgatcagttcttaattctgatgcccacataatcatcttgtaagaagaaatggtttctccaggtctaactgcttgttttgagctgtgtttgacatctgactggcacattggtgcctggtgttaggttaacaagcagttcataagaccattcccgtcagtgatggttttgtctgatttccgcactgagtaactagaagagatgcttttgcagagtattccaggtctcggctagttctccacattctcttagaaatgaggtcaaagaaaacatttggatagattcttgaagttctttatagcagaatttggtgtgttttgaattatttaataggatgagggccaaagaaagctttgtactctcaagttctattttcaaagaatctggggagtgagtctttagttccttttctatatcctaggaaatcaagtggaaattcttcttcaagtcttggagaaatggtatctgggacattccgagcaactcccacatcaacaggtgagggttgtagttaaactctttttcatacactgtattccttttaaaaatatttgaacacacatgcaagtagttttgctaatttggaaacaatttgaaggcttaatttaaagattctctaattaatatttcatttctcatttgttttctatggtaatttgatttcatttaaaatggtattaaaaattcatgtcattagaatataattttgaaaaatcttatttacccctcagtgttaataactgtccattgtgtaaattgatattcaaaaaattcattattttacctaaggaacggacagagtttaagatggtgaaggccaataaaaaaaggaaaaaaatgatgcagactctcaagaaaatgctgttttcagtctccatgtggaatttcaggatgtattagtacagcccgagctggaagggttgaagcagagagtaaggcagggcccaaaggagggagggcctcgtttacatttggacagcagacagccaagccctggaattaatggtaatgaagagatattggtggcctaatagggaattgtggtacatttggaaacgatggagttattcatgtaggaatttttcttctaccacattccctgattcctatcggctaatttcattctggcctagaactgctgttgcattagggcatccagtgtcctagttaccaattccaattgtattaccaatttggaatggcaagtccaaggccctattctggcctaccaaaactggaggcaactggattggttctggagtggttctaagtgtctgggtccttgttcatgtgaagccctcttatctacaggacactgaaccaaaccaggtttctgagttgtacccaactagactggagctgcttggatgtccacagaatcgctttaaatcagttattgagtatattttgcttcgttcccatttgttggacattcaggacattgaacactttagctattacaaacaggaaagaacaggaataactcattataaatttatctgaggaataactggttataaatgtatttgaaatttagaagcaagatagtaggaaaaatgtgccaatattctagaaaatgggcaaaaatgcccaagggactgcagaattatgagttaacaaatataaaaataactattgattgaggtgatagtcatttttgcccaagtggttattctgtttccttttatgaaattgcatttgtctaccttgttcccagcaacactgtgctgtgtccagcacgggaacaacccatggtgattggctggcccggaacttccagtgttgctctcaactcctgtacccaattcccacccagtgagaaatcaggatataaggtcatttgtaccagggaggaagctgtctgtttttcatacatcttcaaaattgacgtgtccagaatgaaatcataaggcaggttctccaaagtgggcgataggaaggtggtgaagataattacagggacaaatgggtacattcttccatcttttaaactcatgtactgtcatttgcagagtttacatattttgatatggctctcgttattgtcttttagcaaaacagaagcaaaaagtggtaagttgtgtttcctttttaaatctactgttaaggttcctatatatacatgcctgcaatgctccatttcagtgacccaagtggctataaaataagggaagagcctcctcggtggggactttgataatcatttgtcgttcaacctgagaattatgaaattatgaatgttgtggctgtggagaggcatgctcaacctcaccttgtcacgcgtgtcgaatcatctttttcagacggagcacattcctccttacgatgttgtaccgtcaatgcgtccggtggtgttagtggggccgtcactgaaaggttacgaggtacaaatatcatctgttactcttcagttcttgatcgagcacccaggagacagtcatgttgacgcttgctcctcaagggtctgtttccacgtgggtcctgatggaagccagtgctcagcatgggaaggcagggggtaccgtgtggggctcatgaggccctctgccctttctttcctctcttgcacacttctcatcttttatgtattacattgtttagaaatacctccctcaaaatattcacaatgggaagatctggtcaaagatttgctgtacattaaatgcaaagaaaaggactttatctgtcttgaccattctcattattattagaagtaatagagaatgaacagcacaagaggacaaacaatcaatcttccagcaaacccaaacctttaaagcccaaacagagttcaccctgctgggtttttaagatgatggcatatgccaccaaatccttctctgcttatttattttaaagggcacatgttttaaaagaccactaaaaacattagtgaactttggagattaaacaaaaccatgtgacaaggaaaagagtagagacttcgtttcagatgtttgttttgactttgtgctagcttggattaaaaaataggtagaacgtgacattaaactctgaaggtgagcagcctccagggcaccattcccatcgagctaggacaatgtgtggcacatagtaggcactcagtacacatttgctgaatgaattaatgaatcgctttcaggcagatctaagaatcctggctctatccccctctctttctctcttgtctttctcagagttggaaatgtcagagggatgagcaggagagtggtctacaaaaatccagccatgggcatggagaatttccgccaacatacacaaactagcaggaaggctgagtccagtgctggcctcagttctctagctgctcctcactggaggcaggcacaactcaggcgtgccaaggatacccggcacctgtgtacaaagccagcctgttgtctcctggcagcagttctatcccctaacgagggaagagggaagagggaagagggtctggtgaacactgctggtttattcctcaacaccctggaggagaaccaaggggggtggaaattagcaattgcacatggttaagcatgaaaaacaccttccatggtaacctccccctaggagacgaatggctacaataaggtcttggctcatagtacccttccctccctcctctctcccttttgacttctctctctctctctgcatgtgtttgcctcattctttttttctcacctctgcaaaggtaacagacatgatgcagaaagccctctttgatttcctgaagcacaggtttgatgggaggtgagaaatatagatgtttttgtatttttattttcctttaaccaaacttgtgtgataaattgaattgtagatctatgtttccagagatttcagaagttctctagttaaaagttaactcagtattcttgggaagaatataataaaagaactctgaaaatatgaagtataacattgagtccccagtgaagaaaggaccatgagaagaaaaataagccatttgttttatttaaatgtatatatctttattttctcagttattaataatttcataccaaaatgttttttatgaaaaaatattaattaaaatatataatatttctcatgagtatagtggcttgctggtcaaactaggcagtatttgggaattgtgtatgtgtgtgtgtgtgtgtgtgtgtgtgtgtcatatgaaagcataaatgtcaagtactgaatttcctcaaaagaagagagtgagaattattttaatcataagcctcccaaagtgatcattttgtagggaatagtacttatttggatatttattatagttgtgggttgtttttattagaaatgtccttgttattttattgatctttttttaatgtattttactatgatccatcaacaatatggctcaggcattagccattaaataattttatcatttaagttttgtgaaaaattctaaagaaagtttctctgttttgcagagaaatggtaaaaagcctgtattgactcaattctaaatattaagctctttcacagtgctgaatgcagtccatgtaaaaataaccacatgaaaaaacctgagatttatcagaaatgtaggaaatttaaatggggtgcatcaaaaagtatgggcaaatgcatccaatttattactgtaggattgaagaaaaacatcacattctttatttttgaaggcagtaattaagccattcactttctctttgctaaattatgagaatccactaaatgcacaaaataattttaaaatgtaaaaaaacttcagatagattttaataaattggtatattaagaataaaaacaagcatggtattgctttaaatataaattgtatgcatttgttaaaataaaagctttctggataattgggtaaaatattcattagtttctggaacaatatagaaagttagtaaacagattttagtttaagaaataagaatgcttctaggtacattagtatataggtcaggctgccttaataaatagaccccaaaatgtgtagtgattcaaacacaatggaagcttattattgctcacttaacagtctgaagcaggtgttccttggctgggagggaggatagagttgggggaggggagaattgggcagaaagtttgttccctctgtcatttggggcccttagcccaggtacgatgtctctagtcagcttgcccagcctggaggtagcgcaactgacatttcactggttagaacttggttatgtggtcatacttaattgcagcggaggcactcttgcagtccaggaggaagaggagatagaatttgttgaatcaataatagccttcgtcacattcatctactggacaaaggcttaataagaaagatgtatttgttccatttcactctctttaaaaaagaaataggcagataatgaagtagcttcaaagaaaataagttaaaagccctgaatcctagagcattggagttggaaggatacataaaatgtcttttagactcatcatttctccaataaccacaatcagatagacaacctgcttctgtttgaaacttttggttattgggattacactttctaaaaaagcattgcaaaaaaatagctgaactctgactttgtaacttaatagggctggtcttggtcttgctgtctgatgctctggccttaaccctaaccctcatgcaggtccctgtggattgaaggcagccagcatgccttggtcgcacgtgcatagttccttcagatatgtatggagtcacatggtttcaacctgtggagctgttacctaaggcagttctgagcagtgccgaatccactggccccataacagccctatctgaacaaatcccatcccataagacagtgttagattattttggtctataacatacttatacgcaacagtgctgttaaaggtttgccctcaagaatgaagaatctgatgttcttcctcaatcctgaggcccagaaaaagggaatttatttaattgtaacagcagagatttgtctcgaatcaagtagaattgtcgcatccattactgtacacatactactgaagttggttttaatagaaattgaatgcaaatttcaatctcaagtattcatggggtctgatgacatggcagagggtctggaggaagagcccagcagtagcaaaagtaatagctgaagagagagacttagccctggagaaatctgatatatttctccagcaggagaaagataggtagatattaaaggggtgaggggtgagagaatggacttgatttcaaatattaagaggccaggcagcagaatgaacaataaggagttccttggttgagtgtatgtggagactttgataagaaagaaattcgctggtagcgtcacactgactctgacatgtcttcttcgtggggaatatcgttaggttttgagctataacatcatgctgcattatgttttaccaattgatacaaggagagaaaaaaacaaatagtctttaattgaaaccagccaagagaacaatgacaaggaaggctttagcacagtgacacggcataaacaatatgttctaatggaaacctactctgtgtttcatgggctatgaatgcagtacgttagacaaaataggagaaagtcctattatttttcagaaagtacaaagaagggatctgttggctacgaggctttcttctttaatctgcttttcagatcttagtagaaaataattcaacaaattggatgaaagtccaacagtttgactattgcagaatcataaacttgggatttttttgataccttagaaattatttgagtcagtttagagctacttattatacaattttattgctgtagctgctattgtggggcctaactgtaatacatgtaagaaaaacagaatactaggctgggcgcagtggctcatgcctataatcccagcactttgggaggcccaggtgggcagatcacctgaggtcgggagttcgagaccagcctgaccaacatggagaaacctcatctctaataaaaatacaaaattagccaggcgtggtggcgcgtgcctgtaattccagccactcgggaggctgaggcaggaaaatcacttgaacctgggaggcagaggttgcggtgagccaagatcatgccattgcactccagcctgggcaataggagcaaaactctgtctcaataaaaaaaaaaaaaaagaaagaaagaaagaaagaaaaagaaaaacacaatactaaacagttcctgagcgccctctgtatttttgaatatctacatgaagcaatgattcctgtgctgacgacgacacagtggatacacaatgggcatggagcttctctcttcatttcacaccacaaatattaattggggattacccatttggatgaggtttgttcagctggctgaatctaccattcacaggctgaacagccagcagtcaaaccagttgcagtttgttgacctatgccaatcatttcaaatcccccaaaaagttgttactttaggcttttgacaactggatcagatcaactctgtgacatttattggacaatttgtaactgataatgatcatggccaaaaatcttagatgaacatcgtgtaacctacacagataggatctcaagctaaaggatgcttttagcctaagaacacataaagggaaaaaaagggcttgagaaagaatttgaaagaaaagaagctaaacatacaacttagggagactcaaagcgatagtatttattaataaaaagaaatgggaacaattggtgctgtcacaaggcaaccaagccatataagaatgaagataatttctaattgcagtcaacaaatggaaaaagaacagcagcaacttccgtttcgtaatcaatttcattctcctatgcattcttcctactgttttctattcaaatgcagactcataaacagccactcaaacaccagtaataattaattgaacacttgagtgtcaaacttgaatatttaaattagtaggttttgagtacagtgtatctgacctgattctctcacccacatttcacggactctgggaatgagaggggtcatggtagactgcccacttttgagagtaggacataaggaaactatctccttcgagtctttaaatctccaataattgtttgccttgtgtacattatatatgtgtttattaacagaggacactatgaataattatttaagaatgcgcttttatatataaccttatttgctcttaatggcaaccccatgagatagttatggcaaagctactattgccattttattgattaggatactgaggtcaaaagatggaatgactcatgcaactaccaagacaaagatccaggaagatactcgggtctcctgtgcctttccattctcctgaaagtgcactgttgcattcttcggaacactcttccctactaataccagaagttttcaaaaattattatactgtctgggctgcatattggatgtagcaaggatagaatatagacagatcttacagctgttacgttaccagcgtggaaatacaaattattttttgatgaatctgtcataactgaaagtaatatctttccacagaaaatcacagaaaactaatacaactcacgatggattgcagcagttaggatgaattctaaagtggaaataagcaacaattggggttcagatttactatatttagggaatgatgtttgctagttttcaggaacattcgctgctacatccagtctgctggggaactaaactcctattagtcttttacctactggccagcaagtcacagaaagttttccaagggaactttttagagatgtataccaaacaaggtacatgggaatgctgaaactagggggactagctgagactagggggtctcagcatagcaagaaaagaagtagaaaggataccactttaagttaaaaaaagtatataagctagatagtattcagttgtgaatgtgattgcttttctggagagccttttataaaaaagaattttgggtttggtgtctggttttgataataataagcatctatgcacagaaaagggaaactcctattttgtcttactgaaggttttctagggctgtgcatgtcttcttctgagctctgttttatgcatgtgtatttttattaatcaataacttgtattagcaaactaacttgtattagcaaataaaatgagaaaacgtgccctttattgtctgcatctttccctgtattggaacacatgaaaaggtttttttctgaattttttcaaactttggtcgtgtttgaaaatagctttgtaaaagtacttttataactcagaaaaaaaaagtgtgaatctgatgataatcccttcagatttgaagaaccaagagtctcttgtttgtatagaactagaaaattttattttcactaaaggagactggaattcaactttctgggttgttgggccctccaaacatcattagtccaaaaatcactggtctagaaagttgaattctgtccctaaacccaccgacttgtctctcgtcatatatttggattgctctgaaacatgcctgtatgtttctatccagcagctccattcttaaataaaccagaaacccaaaaacacaaaaataaacacacatcgctgagcatggtggctcacacctgtaatcccagtgctttggaaggctgaggtgggtagatcacctgaggtcaggagtttgagaccagcctggccaatgtggtgaaacctcatctgtagtaaaaatacaaaaattagccatgtgtggtggcacatgcttgcaatcccagctacttgggaggctgaggtgggaggatcgcttgaaactgggaggtggaggttgcagtgagttaagattgcaccactgcactccagcctgggtgacagagcgagactccgactcaaaaaaattaaattaaaaaaaaaaaaccacacaaaccctattctggagaggaaaggagctgcctatgagacttcatgcctgaaagctgcagtggccaactggagtaatagaaagtcaggtgtgggtttactctacctcaacttgatttaaattctcactatctcagagcaaggcgaagacttgactgtgcatccatgcttgaccacttgactcatagcttgagattcgggcttgtagaacactgaactgtaagagaatggtggagtcaggtgacttggcactggcccgatacccaggggctagtttagacctgagctgtaactaaccatgtgcagctttctgtgtgtgtctcagtttccctcttggtaagatgaaaaagttgttacaccagtgttttccagtgtcttttagcagttgaacagctttttatagtgaaatcatatataaagccccaatgcagaaaacagaaatgcagacatgtttacctggcactgaggatagtgaagctggagcccactgaacctccctttagtcctcagaacagtccctgaggtgtatctgcaaaaactcttggtttctgcgggagacaattttgaagatgcatcaaataatgaaaagggtctaacagttctaaaattttaagaattgaaaacttcctgacaacccacagcatataaacataatgacacaggcaagcagtgctttgcttaaaatggcaccagaacttttgcacagactgttgttttaaagaatgatttccaaccatctgaggaaaggactattttaaattctctccaaggctttaggtcactgaaatcaggtacagtctcctgacatagctggcagtgttgtccccagacaggtatgaaatgacatatgtttcagtaattgataattctaccctccttcctgcttcaatccccaaagagtttgaaaacagaagagaatgggtgtactaactgagtataaaaggggaggggtgctactttccttgtctcctttctgggaaccatgctgtgaagatgagaatggagaaaggcccatggtgacagtaactggcctaaagaggcaagctttgaattctactggtagataattggaagttgagcaatctcagtttaaaatagtctttaaattctaagttgcagatattctcatttgataaatcatatgcaaatagatgcccctctgcatttatttgcaatgtctttgctttattcttcagttttttttttttttttgagacagggtctcaccctgtctcccaggctggagtgcagtggcgtgatctcggctcactgcggcctctgccccctgggctcagatgacctcccccacctcagcctcccaagtagctggaactacaggcatgtgccactgtgcctggctagtttttgtattttagtagagacggaggttcaccttgttggccaggctggtcttgaactcctgacctcaaatgatccacccatgtcggcctcccaaagtgctgggattacaggcatgagccaccatgccaggccctgctttattcttctcttgcatgaccgaaggatactttctaacgtagaaaatcctggcacaatactcacattactttcaactagagtgccttatgactgcccaccgtatgcattcaaagtcttatgcaaatatgctgaagaatcttatgcatgcagaaaaaataaaaccattttttcacattcttataaatgaagtatccctttgggcctgtggagaatcacgtgtgtatcacaaaagaatgcagcttagccacagactggtagattgtctttgataatcaaaatgaagagggtttcccagctttgactggcatcattaaatgccagagcaaagcatttgtagttcctgaaggtcttgttcaagagcaaatcaactatgaattgtggcaaattgtattgctacttcctagaaagagcatggtttatttatatgtcttgattccttcctggtgtggtgtatattataaagggaattcagcaaggcaggccataatggaggaagaacatttttactggagtaggtttttttgtgtgtgaaacagtttaaaccttcctccattctgctctgcttgcattctgatactagccagagcctgtttaaaatacttgtggccaatgtttgttatactgtggttcccctgtagcatgtaaattggttattaagtactgtggttataaatcacttggagagccccataacatttttactggcttgttctgttctgtgttcctattcataggatttcaataacgagagtgacagctgacatttctcttgctaagaggtctgtcctaaataatcccagcaagagagcaataattgaacgttcgaacacccggtccagcttaggtaagatgttcaaatgtggtacttcttcaagctgtgcttacagaccgggctgacacatggtgcatttgtgaatgtctttttcaatttgttccccattctgaacgggggagcactgagtacctaaaaagaatgctagctatggacaagaaggcaacagagtcttgcagtagcgagagcttgctgtctctcagctttagtcaattagctaattagtagtctggtggaaagaatcctcaatgggctctcctagtcttttcctgcctaactacatgaaaccagtcatctccactttgctcagcttctcaacaaggctaatgatatctgtcatacctgagtcacagctgacataaaaggaaacgaggtgttcagccttctgagatctttagaagaaaagctagataacggtgttcttggtgttgtgaatggcaatgaccattagtaacatgcagggactttaaacatgtctttcctggggtaccagttggaaagcatcctaaaattccccatgatggagaagaataaaggctgtaagtgagtagctccgtcaagccataggtgagcagggctgtggaggatggatcataacccacagaagcgagtccatagtgctggtgaattacatcgttcatctggaaagcctgttcatggtctccacgattgccaagggtggtgtagtccactcatgacttcctaggattctctttacattcatattctgagggcaacttgttttaactaggaaggataaatagggctcttccatgccttacattttttaaactgttgaaattagctctatagataatagaaaaataaaattaagatttccaagacagagtgcatgccctaacatcacattaagaacccactgaccttgagccaaagatcgtgcaatttgtaaagaaggtacaaaatattatctgtgtgttcctgacatgggattggcatgtgataattgctaataaatgtgggatggttgctttgtgaaggattactaaacataccaaatagagtagtggtcagtgcttgtgaggggaagatcccagcgattagtggtcccttcttttgtcttgtatttagagccttccacatgcagagggaaacatgctcaaaggcacagtattttgaccttgaagaggtacaatggcagtgttgatggtgaatcctattaggtaatgactaaagttaaatatcatgggtgacagggacattaagttaggttgaagtttctcaaacaaacatcaattctctgctctcctgttttctacccattttgtaactccttatagtgtctttggcttttaagtactccttctaatgtatggtgagaggctaaaagataattaaaagcttaagccaggttgtctgactcctttaaccattgacacctgccaagggcttcatgtgtattcactgaagtcattccttacaatccattcacctgctgtcagagtcagtggggtggatggggggcatgttagtgtaaacaagaagaaacaaagtatatctcacctcatggtttttacctttactctgtaaagtcataaacccacaaccattggaattaatttcatggcaatctattaattttataataaccacaatgtgatccatttgtgtgcttgttaatgcacatttgtagattccttcatcaaatgtttattgaacacttgttatgtgccatgcattgtgctagacttaggaaataaagacataacccacacacagtatcttacccatgggcaaagagacagaagagacagatggttagaatacctgtgacagtggaattatgaacaaggaactaggggtataaagaagagtaggggttaagagatgtgtgagaagacttctcagaagttatatttgagctggttcttcaaggcaggcaggaatgtacaaagacattgacatgtaaacaaaaatatgttgttgagaaacaagtagatttgtgtatagcatgcttagaacagggaagttggtggtgtgatttgagaggaacagaagagattgaaaaagattgaggccaatgtgttggggttctaatgcaccttgctaaagagaactccaaaatagatcccatgcaatgttaattttacaacatagtaacagttgttacattcagaatgttttccattgtcaaataaatttggaaatgatgaattaaactgacaggtttcttctctgcaagacttagagccttgaagatatgaaggataatgcatgtttgaaattctaaagagaagctattatagtattcaatataacccttacacaaaacccccttcttcccataggatatcttatgagattattgttccagagtactcactttgggaaatgttgctttggaccctggggagccattgaagtgttttaagcatgggagaaatatgaacaggtttgagtataagggatataatttgtgacagggatcctggagagaggtgggcccaaatcatcatggtcagtttatagaagtgttcatcgaggtcctccagcatcatagtccatgactccccagggctccatttgactggaataggattatgaggaaaacttatttggaacccctctgagaatcagtccaggtagccaagattttttgatttggttgagatctttttctttaaaaaacaaaaaaagagctatatagataaatatgcctcacagataaaatatatttattacattctgtatacatattatccaaacattgggctcaccccagtatttaatgtggccttctccagcatccctgctggcttgttctgcccaagcacctctcttcctctgcccaagtgcctgttgcctaagagttttgtgttggttaagcagtaggtatggctgcccttgctcctggcagaaaccacacttaacctcattgctggtgcagagtaaataaggcccaggtatttctgagtcatttacacagaaactcagagtgccttgagggttatttgtaccagggcagtccagttcacatcaatgtctttctgctgcttctgaaaatattgtattcatatttgaagcttaagaaaacataggcttgctcacatgtagtcctggccaggagctcccataagccagtgacagtttaatgaaaacagcaaatgggaaacataccctgacatcctgaggctgaaatttactacagtaaaaattgactttattttccaaacttccttctgaagaaaatttattttaaaactgtttctgccatgtgagagaaaaggggacaaatatgctacattactaacaaatgtagaatatgatttcagaagaatttgacaaataagcccacttgttttcattaatattctgaaagctagtcacctttccaagcaatgtgaagtctttcaggccattggtattggataacatgaaaagtgatatgttgactcttcaaattaatcctttttaatacagatcatgccttaaacttcagtgattctatgggaaataagaattttatgcaatcatgcaaaacataagaaaatagattttcatgatagtcttgagtattcatgaccctgcacaccttgtcaatccttttggttaaggaagggagaatttttttggtgggctatgtgaacttgaatttatactaaataagcaaagcaaatcacaaacacttttcaatgaggatatttagagcaacattacctttttccctaggccatctttagggtcgtttaaggccgggtacaatggctcacacctgtgatgccaacacttcaggaggccaaggcaggaggattgcttggactttggagttcaagaccaacctgggaaacttagtgagacccagtctctacaaaaaataaaaaatttagccaggcacagtgatgtgcacctgtagtcccagctactcggcaagctgaggtgggaggatcacttgagcccagaaggttgaggctgcagtgagctgtgattgtaccactgcactccagcatgggacacagagtgagaccctgtctctaaaaattaataataataatttaagttagatagttttgtgtactgtatgtactttggaccagattacagcattgtttggtcacacctatagccaaaaaataaaaataaaaaacaaaatcagctgggcacagtggctcatgcctgtagtcccaccactttgggagaccaaggtgggtgcatcacttgaggtcaagagttcaagagttcaagaccagcctggccaacatggctaaatctcgcttctactaataatacaaaagttagccaggcatggtggcgtgtgcctataatcccatttatgtgggaggctgaggtacaagaatcacttgaacccgggaggtagaggttacagtgagccaagatcatgccactgcactccagcctaggcaacagagtgaaactgtgtctcaaaaacgaaaacaaatcaatttctctgaaaatcaaatagtataattcagactttgggcatgatccaataagtcaggtaatttataaaatatatatatatataaaacttttttatatttcagaaagccatgtcctatgttgattatctgttttccttaaaaaaaaaaaaaactggattgcttcagacatttgaaaagagtagatttttcatttgactagactcatgcacagatttgggtcacttggctattacagccagccagatagatttgcatctagatgcattgcagcgttttaatataattggccttacttttttttttttaatactgaagctaattatgccttagaacaagtacattggctttcgtacttaaatctaactagacttagtaatatgattagttttaagggtagactcagaacaattaaccagtggtacaaaaatatgcatatcagtcaaaacagatgagttgtggggtttttttaaaagaagcatgtccacaaagtattagtttatacttcgttgatagaaatatttcagtgtaatttgctttccatgtgatgttgctttgcacatatatttcagttgttttctaaatgtgcttttagcttctatggctaacattaaagttctttagaacaaaacaacaatcaaaaacaacataaaataatcatcgtagttatataaacagctaaatattatattgactagaagaagcaaattaagagagccatctcagacgtttctaccaactggttgtatgcaaaactcaacccatctctgtctatatttagaaaatgtcttaaattagacaggactatgaaaatttaaaatgttttattttgtaatgtagaccaacatatctgaaaatatactatatctttctaatgtaagaactaattcataacaataaccgggatctatttattatttttcctttaagcggaagtacaaagtgaaattgaaagaatctttgagttggcaagatctttgcaactggttgttcttgatgcagacaccatcaatcacccagcacaacttataaagacttccttagcaccaattattgttcatgtaaaagtctcatctccaaaggtaattagctcctttctgccttaaggtttagaagtgcatcttttaaaaatgtgttttgctctgtggttttttgttagtggacaaaggagaacgtcttgctgattattaataagcacatttaaaatctttccacagtgtacagattctatgaattttcagatagtgaagaatataatagttcatttcttctaaaagctactattgtagatcccaaacaagacagttatgcaagtgtataatagaaacaaaacattaagacagatgtggaaaagtagactctggcttatcatagactatgaattctatattggtaaatttcttggatcctgttgattcctgtgtcatccatactctgtacctagttgagagagtacatctatattgatcaaaaaaggcatctatgttgatcatatataaaatagaatatcactgtttaaacatctcctatggaagcattatagaccctgacatttgtgcttaggttgagttcttgaaagaatgtggttattccacgataagcacaatgggaaatttgctttgtatctttatgccattgtgggaggtaaaaataaaagtgaaatagccccaaattggtttcttttgatttgggtgttctttcatttttaaaaaaggatgttgttcttaaaaagttaacgtgaaatggttacccttgggaagtactatcttaataatcagtttcttctctgtgcctcctagtgtattttggtgcctaaatacaaattcaactgccaaccagcatggcagtcttctctcatgggtggagaatgtctaaagaagctgtactctcctccagatgttctgagatcctagccttccatctatctctgcagacactgctttggtgcagtggacttgggaatcctgaacaaactagggccttttgagaatcagtagaatggattgaaagagctgctgggggttcaagcacttcactgcagtgcaggagagttcagcccttcccactgcccatgacactgtggtgtccttaagtgcaagaacaggagttcccagacacctatgtcctggggtattatagagctcatagattagcattgtttgcaggggaagggccacgggacatggcagtatatgaccaaatgcagttacagcagtggccaaaagacatagatatatcactggtttacatgtagcaatatactaatacaaatgttttgcctgggtctccaatcacagaatagtctgattaatttaaaattaaactgaaatgtcccattaataatcggtgacaaaaataaccagaaaatgactctgacatttatctgacatggagatagtgagctaaaacattattcaggtgaataatattaaagtattacttaacataaatgacctggtacagtccactccctccatttttacaggtctctctttgaaatctctgggaaaaatctaggatgggaactcaggctcctcctgagacttcacacagagttagaataggatgaacatatcaaatccatggaactgagagccaatgtaagcagatgacatcattacaggtttaaatatatgatttctcacactgcatttcctctctgataatactcagggccaagcagaccattaaaaagatcctggcttatttgattttctttcaactcatctacaatacctcaggttcatgtcttcttctatcaggttttacagcggttgattaaatctagaggaaagtcacaaagtaaacacttgaatgttcaactggtggcagctgataaacttgcacaatgccccccagtaagtatgatcattttttgtcttcatcattcttgactagttagaagagggtgggtttttttttcttcatattgttgttttcattctaaaatgatggtgatgatggtatgttgtcatctaaaagatttcttggaacaaactgctgctgttatgttgcttgtattcaggcatccagatgtggatggtgtttgccttgtaataagaaatgaacttagtgtccggggtctgttcttctcactgctaccttgtttgctttgcaaacatgcagcaaaccacttagcattcagcctccagtcacatggatacgcttaagaaaagaacaaaagaaaacataccaatttgatcttcctttaactcttctgcaagaaaattccagcaggcataaaagattatgacactgaaggtcaagaattgattggaactagagaggccctgtggttatagtagatgaaagagtcagggctgagtcagatgaaaaacgaaattatagcaactcttcttctagtgccattgccagaaaacagctgctgggttagaaggtgagcaatggtgggatggggtgggagatggaactgctatcacatggcactgggtccccagtggccagtctctccacttttcccactgacttactatttctgtgcctatgtttctgtaaaggaaataactgtccttcttactcaatggattcactagattgttttatacacttgtgtaggattgtttaagctctatggaagcatgaaatctgattcaaatgtttagagagggcaacacagcataacctgtaaaagcacagactctggagccagatatttgggttttgaatccacactgactagttatgtaatcttgggcaagtacctatctcatgggattggtgtaaggattgagtgagtgaatatgtggtaaagctgttagaacagcgccaggaacataagaagcaccgtctaagttttcttattataattactggatacactttgtgtgacgtcatgtctggtccagtagactctgtaagaacccgtgcccctctggctcactgttgtatgtcagttccctatcatagtagacccataatatatatttgtggaatgagtgaataaatgaaaggatgttcagacgataagagtaataatgcatcctttcattagatgcttacagttggccacacagtgtgctagatgctttacatagattatctctaatcttcacagttacctggtgagataggccatattatctccattttatagtttaggcaactgaaaacagagacattaaacgatttccctaaggtgacatagcaaattaggattcaatctattctagatctatctggctccaaagacaatttcctaccccctaacccatccacccatacacacatgtacctggttacctaccctgaagataatttgatagcttggagcatggcgtgctctgttaagtttcacttcacgctgcctgttagtgaagcccaattacacagtggaatgtatgattaaggcactgaacagacagaggaatgtattgcccagccctgaccttctaatgtttcacagttgaaggaagataatctttgttgtctagctatcaaaagccgggaactatgttattatttccaatttttggaacaatcttataaggatagttatatcagtttggtcttctgggaagcagacacctaaatggaattacaaatgcaagagatttattggagaaattttatctttatgaaaataagtttattaacatttattctaataattactagagaaaattcttgtgtcctattaaatttgagggattttagctgctgagagggttgatcattgagtagttgtacatataatatggtttgttacatctgaaatagctggaatcaagaaaagatatttgcatctgtaaaagcaactaatatactgagctaccttaggacttgtacccaggtcagagatttcaaacagctccatgactggaaagacagccttgccttaccattatctcagtaggataaacactttatctttttatataattggtaagataacctggaattttaaacaggcagtctggatggataaggttaccttgtacttagcattttctaaacactgtttactttattaaacatgttcaattgatactgcacagatgtagtaatgctgaggaggaatagtatcctctattttggcatgtgtgaagaaatctttggattataaaaaccagtagtaaccttaaaatgtgtctgcatttgcccctgctttacttcaagaccataattataattgtcatccaaagattggtgatcactgtgtcattttaattcctttaggagaatttgcgacttacttaattggccaccatatctccagtatgaaaagtcagcaaattacattggcagagtatcacattgctaagaaatgaaaggcaacagtttttggaaagggaagcctataggagctctgaaaaaagttaacgctgtagccagaattaatcctagatccagggactgttgaagcaaaaggggaccttaaagagcacccaatatagtatttcctagactatattatttataatatgggtcctatgtgatatcagtaagtgttatgggaaaataatcctgataccaaaaatgtttgagaaaacacttaggtgaacaaaggtagtctggtttctttactacagaaccctgaatatgccaatgtgtattttatatctccaataggacaaatagtgtgcacagcttcccctaaaattgtgactgcagatctgcttttccattgagcatcctatgggtccagtggaacatgtctagggaaagacttagtccaatctcctcattttacaaatgatggaactgagaccaagagaactggcttttcaaaggttgtatgcctgggccaaagtcagcttaagatctctttctcctagtctagcaagactagatgatgaatggcaacaggtcagttatatattctcctggaaagaaaagtatgggttttggccaggtgcagtggctcatgcctgtaatcctagcactttgggaggccaaggcgggtggatcatgaggtcaggagtttgagaccagcctgaccaacatggtgaatccccgtctctactaaaaatacaaaaattagccaggtgtggtggtgcgcacctgtaatcccagctactcaggaggttgaggcagaattgcttgaacctgggaggtggaggttgcagtgagctgagaccatgccactgcactccagcctgggtgacagagcaagactctgtctcaaaaaaaaaaaaaaaaaaaaagaaagaaagaaagaaagaaaagaaaaagaaaagataagtatgtatttcatgggtaaggatttttctaggagagagatcggtgaactttttaagtaaagggccagatagtaatatcttaggctttgtgggctatatagactcctttgcaaaactactcatctctgctctcgagcaggaaagcaaacatagacagtgtgtaaacaaatgggtgtagctgtgttccaatcaaacttcgtagaggcatgagacaggcctgatttagctggcaaactgaacttgcccccttgttctgggaccaagctatggttatctattactctgcaataaaataatccccaaaactcagtcacttcaaacaatggccacttgtagtattcagctggcggctgacctggtaccttagcagaaatggctgaaggctgggctcagccagctctttttgaatacaggctcttacgtggcagctcccaggctccatgagcaaagattccaatcttttacagcctgggcatagataccagaccacatcatttccacagcattctgtttatcaaaatactcacaaagagctgggtgcatggtgagtgcctgtagtcccagctactcaggaggttgaaacaggaaggtggcttgagcctaggagttcaaggctgcactgagctgtgattgtgccactgccctttaacctgggagacatactgagaccttgtctctaaaaggaaatttttaaaaattagctgggcatagtcctagctccttggtaggctgaggtgagagaattgcttgaacccaggagtttggagctgcagtgagccaggattatgccactgcactctacccgacagagtgagacattgtctcttaaaagaaaaaaaaatcacagaggctgcctaaattcaaggagaggggatataactcttcatctccatgagggaatgtcaaggaatttgtgaccatttaaaatctgtcatagacagtaagatgagtggggaaaatgggctactggatagttctactttggaagaggaaggactttcctctcgttgcccattcggaattcacagaagaaaagatgggatgcagacaaaaggggacctaggggaacaggacctgcaaacccatctcattttttttttaatatgaccagcctgattttgtattgccattatacatctatacactacatttttttatttctttttgcttctaccaagtattgatattctttttctcttcagataagttgaaaatagtatgttttttaagaaggccaagtgtaaacttccccagtactatggtaataagaagaaaagctgagagacagacaattgaacatataaatgaaatgtaatcctttaatcctacttagttacaatctggcttgtgttacccaaagctgaccctgtggctgtttgagctgtgtaatgtttttttgtgtgtaaaatgacattgatcactccttctgggagaggggaactcatctcctcagtagagtcttgcaaacctctaatgttacagtaaccatggtcactctgttctgtcgccctttattttccactgctgaatggactcagatttatcctatgaaacacaagaattctggagcgaatgatagtgcccagttatccttgatcatattgctctcacagtagtaattttccactgccctcttccagtcattttatttgaattatttagaatcgtgtggatttacctgtctatttgaagtgctctcctcattggtgcattcattattcacagcccctggatgtccacagtttaattcctaacattgcttttgaaaaggggggtaatcaatttcagatgtttgcttcatgaaataagaccacatgggatccaatttctctcagcccaaaggggactacaccttttccagggatttcagccactggacttgggtatatcgagttaggggtagttcattcccaccaatgctatgatctagcacatccaattaatctgactttaacagaagcatgggataccttttctgtaggcactaatgttggtagatggtattatctttgaagaatacgaatggacagatggaggggcgtggggaggaaaacatgtttgggttcacatcaagtgtcacaaattatcaagagagaggaagtcaaaagaatcaaagttatatattttttgccctcattttaacctcaccaattactggcaagaattatgattatctttcctgtttagctcattaaagtggaaactacctggaactaactgctagagcccagtaatattgtcaccccggttggagtgcagtggcgcgatcggagctcactgcagcctctgccttctgggttcaagcgattctcctgcctcagcctcccaagtagctgggactacaggcatgtgccaccacacccagctaatttttgtattttttaaaagagatttttgtattttttaaaagagatggtctcaaactcctgacctcaggtgacctgcacaccttgttctcccaaagtgctgggattacaggtgtgagccaccgcacccatcatagatcttttaaaagcccttcaacttagagtctaatttcccatcattagttgaccagtgagttaaatactcagaatctcaaaagctttaataatgtaaagaatggagttttgatatgaaagaaccattgggttgattatttttataattagcattacatgttgtaccattcagccgtttgattttactgaacagtacttgccagtctttttttgtgcatggtttgttttgttttgttttgttgagacagggtcttgctctgttgttcaggctggagtgcagtggtgcaatcatgacctccccagctcaagcaatccttctacctcagcctccccagtagctgggtccataggaatatgccactaagcccagctcattttttgattttttgtagagacagggttttgccatgttgcctaggctggtcttgaacctctgggctcaactaatcctcctgccttggcctcccaaagtgctgccccaatctttttttttttttttttttttggtgtcagtttcagggtctctatattttacaatagcaaggaaataaaagtgtgctcacccatattatttctttttaccacttagaaataagaaaaatgcccaacatgcagttttatctatgtacaacaaataaatgtaaagcaatgcgtatcattataattattattatatgcatgggagagttttgttacatttaatcccctgtctagctaatattcagtaatgagccaactttaaaaagtgaagttcaggcacagtggctcatgcctgtaatcccagcactttgggaggctgaggcaggtggatcacttgagcccatgagttcaatatgagcctgggcaacatggggaaaacccatccctaccaaaaactacaaaaaattagctggatgtggtggtgcatatctgtagtcccagttactcaggaggctgaggtgggacaatcacccgagccccagagattaaggcttcagtgatcggagattacgccactgcactccagcctgggcgttggagtgagaccctatctccaaaaaacaaaacaaaacaaaacaaaaaacaaacaaacaaaagttaaaattaaactgcaaaattagtttctacagtttataaactttttattaaaaatattcaatagcttcctagatttaaaaaaacagacaatatgcattagttttaatgagattctcccctccatgctagaaaatatgtattttatagtcattaaggaagacttacccagtgtctttatatatcttccctccaaaaagaattgaaaagaaataaatggaatatgcttcatttcctccaggtaggacccggagagcactgtatcttctgtaaaaagtagggtgacccaccatttgctcagaattttcaaggtttagcagtgatagtctcatgtctcctgaaacactgagatccccagcaaccacaatcattggtcaccttaattcaggtggcttccctagtaaagagcattacttcttactctgtaaatggagtaccaaacagatggttaaatacttttttttaaagaccttgcaagtattcatttccattttattcagtttcagtctttcttcccctttctttcttctctgccattttagctttcatacccactaaatgagctagaggcatgtttttcactcttcgttatttacaatgcttttctttttaattttcttgaaggagcttatccagaaagggggcctaatgtgcctgatttttttgatggtttgttttgattcccctattcactacttatttactttggcagccacaccattctgtctacctcagctgaagagaatatcccatcatacaagggcaaaggtgttccctgtggccatgctttgaaaacagctcagcgttgcccttctcttgggctgcaccaagggcatggtatcaccgagtgggtaactgttcgctgcccgggacttctgctgattaggagctctctgcatccatagcccatgctgcaggccacatattgcatagtaaggagctgactacacttgaacctttaaatttatgaaaaattggcatagctggtttgcataattcattgggttgcttctttttgcatttcttgtatgatttttaaaaattgttttcccctgatactgagtttctatcactctgatctactcagctgtgttatttcctaaacagctaaagagaaaaattgtcacagatatacaggctgtgaaattcttcctagatgaaaataagccacatatgtcagtattcattcagaagcagaaatttgcttttctctgtgttttttgaaagcctaaaagcagtttcaagtcatcttccaacctgtatctgtcttttagcagtgcaaaagcagtttcctagaaatgactgaggcttataccatgtgctgatatatacaaattctatccattcattggcaaagagaagtgctttattaaacttatggcaattaaatgtgccactaattatgtctacaaccgtgacaatgtaacaagtagaacggccaagtagatataaacctcattcaaataacattctgccataggtgctgcttaccctccttgggctttgcaatcctggctgtgaatgtcaggacccatccggcctaggtatccttggaaggtttttcagtttggcactttaagaaacagcaagaaaatgatttgttgagactaatcaaacccatattatagaatgagacccatgtaatcaaattttatggttcacataaataaaatgatataaacaaccaactccaagtcacataaaatgtagaacttgcagcacactttagcctggaatggcggaaagactggtcctttgttctggtgctgcctcgtttcctctttcttcctcctgtgccatctgagtctgtggatgtcctttggggtgtagctgtccttgtctcactcaagtcagcacctcgatgcctctatttatgtcaaagcatcatggacagttctgagattctatatttgtaactgttgaacttttacatgagttggggaggggcttttgattgcaagagacaaggaattcccttgggttactttagtggaaaaggggatttattgtaagcatatatgttgacagaaactctaggcagtagctgctttccttggcactcatggccatatgatctctttcttccattgtgcctctgcttctctttttttttgttttattttcgtccctctacagataacattctttggcttactcgtaacttccccttccttgtaagttcagttttcacacatctctccaagcctccttccaaatccagaactttatgctgcagcttcaaacgttaactggctcagtctctttatttttctgaattaaagtcccagtgtgacatagattattatggattttaatacttatctctcccaccacactttatgcttcttgagcataagatgtctgttttccttgccactgtatacccacagtgcctagaagaaaatagggactgagtattttatgaatgaataaaatatgcaaaataatctgaaatctactaataactgttcttggttggggggaattttctacatgagttgaactggctaagtcttctcaaacatgagtccatttggactgaagtcatcttattcttttcctagtcttgttccaagaaccccaaatggctttccaatttaaggccaaaattttccataaaaattgatgtgatgaaacatttaaatagtaaatgttgggagagagattgtttccatggtgacttctgcttcaggagtccttgttctaagcacagaagagaatgactgaactgagacaccactaacttcacatcatccagttgccattaacctaatttcagccagctttatcagtgccgatggcagtgaccctgtctttgattcattcctgggaggttcttattttggtaaaatgagttcataaaagcagatgaaggtggtgggaaaggtcaatcctactattgaaagttgagatgtgagccgggtgtggtgactcacgtctgtaatcccagcactttgggaggccgaggcaggaggatcgctggagcccaggagtttgagaccagcctgggcaacatggtgagatctcatctctacaaaaagttaaaaaagttagccaggcacagtggtgcatgcctgtggtcccagctactcaggaagccgaggtgggaggatcgctagagcccaggtgttccaggctgcagtgagttgtgtttgctccagtgcaccctggcctgggccacagagcaacactgtctcaaagaaaaagaaagaaagaaagaaagttgagatgtgctaacacttacctgtggaatgacttttctctttgtgtggtgccaaagttttctggtttccctctgaagagtatatgtctggggtatatcctgtctgtgttcccagccacactgcaatgacaggggggccaccctgctcctctggaacagaacaacttcctgagtacagaccagatgttgaacaatggccttactgtccgaaacgtggacagcagatacttcttttgtgaccccctgctttccctaactaaacaccccttgttcttttttaaccatttcacaaaatgatcttgtggtagcagaaaccactgccatgtggttttctgttattaatcctaaactttctttccttattgttttatcataaaacagataatgttattttcacaagcattctgaaaattacctaagtaaatgttattcccttcaacatagttaccttaggagaaaaaatgtttattccattgatgtggtcattgcccaaaacatgtctagaactcccttctcagtgccacaaacttgcttctctcatattccaaagtgtgtagagtgcagctctataggaatacatggctaaagatgtgaatacacgtgggtttttgtcatattttacctgtaacacatttacacttacttcatctttttctttctaaataatgaaaaatccggctgggcgctgtggctcatgcctgtaatcccagcactttgggagccaaggcaggtggatcactaggtcaagagttcaagaccagcctggccaagatggtgaaaccccatctcttctaaaaaaaatacaaaaaaattagctggacgcagtggcaggcgcctgtaatcccagctacttgggaggctgaggcaggagaattgcttgaactcagtggacagaggttgcattgagccgagatcgtgccattgcatttcagcctgggcaacagaatgagactccgtcttaaaaaaaaaaaaaaaaaaaaaaaaaaaagatccaaatattgaatgaacactttcatttttatattaatgtctacattcgttcatggataactgtgtaactcttcacttgaccctaactttagaaactgcccatatagcacctcaaatttgattttagctaatagctattaaaaatgctattatctgtgttaagtggaattttaggtttcattgcctaaaacctaaaatggaagtaaagtggattttcttgtcatctacaggaaatgtttgatgttatattggatgaaaatcagcttgaggatgcatgtgaacatctaggggagtacctggaggcgtactggcgtgccacccacacaaccagtagcacacccatgaccccgctgctgggaaggaatttgggctccacggcactctcaccatatcccacagcaatttctgggttacaggtattgtcactttttcactcatgctttttacaaccttacatgtaaaattctatgggaacttgattaggatggagactggagtcatccttaatctgaagagggaacactatgtgcacattatatttaaaaatcttaaatattatctaattatgatctatcctagagaaaactacccagagactgacaatttcctgagaattatgctgtctgtgaatttacagtggattttacttaggtaaattaactcctcctatgtctaaactctgctggcaaacgtaatgcctactcaatgcacctgcccattacttttttttagagacatagtctcactctgttgttcaggctggaatgcagtgatatgatcatagctcactacagcctcaaattcctggactcatgggcttatgcagtcctgctgcctcagcctcccaaatagctgggactacaggcacataccacacacatggataattaaaaaaaaaaaattgtagagacagtgtcagtgtctcactttgttgcccaggatgatctcaaactcctggcttcaagcaatcttcctgccttggcctcccaaaatgttgaaattaccatcatgagccaccactcctggcccctccattacttcttaatgccacttcttaaggattacacaatagctaagtaagatatataggtgcagataggcctttcagctgcccttaattaatcctgccgcacccaggttgctaggcctgctctctaccttgcacaagacaatgtggatataagtagagctgctctgttcagaaacagtaactgatccctgagttttcttggggctgtgcaggtgcccacctttgtaagtggctgtggcacgtgtcctttagggaagctggtgacgaacacaggatcaagaggttctcccttctgctgttctggtattgcactcagaggtagagatagggaaccagagaccttatggtacaaaatgagcctgcctttctacatcaattattatttaccattcatcaagtagctgctggaatgtggccaaacccgcagcaaactgaggaacatgtagtcaattgagccctcttgtatcatgatgagttttgttttaatggattataatgatagtcttaattgtcgatcatacagagttaactctgagataaatggcactctctgaaatgctattatagctgtattactctgttacaaaattgcatctttgtaagcagaaaaactgtcatgcaaatgaatagcttttgaaactagaaatgaacatgaaaaatgtactgtggtaatgtacagcacatacgcatgcattaggactatttcatgccttgtttcacttcccatgggctgatctgagtgtacattactattgactagtgtggattggctctgaattgtacattacagaatgagaaatagatgcatgaagcaatacacttctgtaatgtacgtagaaatgcaatgttgcacttttatattgaatacaacaatcttgactcatcactgctaagacatccacctagagtggttctccctgtttcactaatgagttaatgtgttgccctttattctgtggcctatttcttctcccagtaacaattgacacttcattgtgaggcacctgaggttaaaggcacagtctgtgacctgtcaaatgaatttccttctgcctgaatctgagtgtactttagatgagatgtgtctgggcccatggtttcagcaggatcctgtgccttaactgatgtgacctacctaaaccagtagacacaagtagataaatgttttctcatagtggagaaaaatgttgaataacattttctgagccttcaaataagtatcttaagatgctaatttcaattaatggtattagaggaatttcgtttatattggaagattattttgcaggacattttagttgaggaagcaagatttataaatgtatcaattagctggcttcataattattgtatacacccttggaaagattattacatttatgtaggatgcagaaacactttattttatgaacagcacaaataataattttattaaaatgtttttaaaaggtataaggaatattcagttagatcaaggtgaggtgtgttactttagaaggagaaagattatatcaattcaagagagaaataataaatgctattctgaactttatttcccaatagtaaaataattttcatttttgcaatagaaatggaattattagaacttcctaaatatattaagttccatttaacagttagctttcaattctacatttgtaataggaagcatagtcattcagcactgtggaattaaactcataaactatcaacactctggcatcttttcatgttgtgtcccaaataaataagaccagatattctaagcagatcattggtgcatcaggatgccttattaagtcagatatttagcatcttattgtacagatcctatgattttacatacatttacatgtttagatgaatgaagctgacattatttaatcaatgaactatctgatatttttagagtcagcgaatgaggcacagcaaccactccacagagaactctccaattgaaagacgaagtctaatgacctctgatgaaaattatcacaatgaaagggctcggaagagtaggaaccgcttgtcttccagttctcagcatagccgagatcattaccctcttgtggaagaagattaccctgactcataccaggacacttacaaaccccataggaaccgaggatcacctgggggatatagccatgactcccgacataggctttgagtctaatgaaacaaaaaatattcatctgttgacaatttgccatagcagtgctaggataaaccaatcatcttaacttggctaacatagcacagtatttactgtgctaatgggctgctgtcattttatgctaagtaaggggcaaaaaaaaaaattacattatgcccttgagtctagatggatattagatgcccgatcatatagatatttttaagtgcaacatttacatgataacagtacattttgttttcttcatagatttagacacatcaatttgtaatttagggtacttacaaggcacatataaaataatttcccatgctggaaattccaaatgaccagttccagttggaaccaatttataaaccaattcctgttggaatttgggtgaattgactagaaagtctacttgagcatgttgtaatcaactgaaaaatctggggggaaaaaaaaaaaactaataagaaaatcgaaataccaatagaagccaaatccagctttggtatttatttgctggaagctaaatttacacttaaagttggagtgtataaacattttaatatatgttaatgttgccagaatgacttttcagacttaccaaatgtattgatagtgccaaaaaaaaaatctcagaaatcttaatgcagaaattatatagtctcctcagattttaatatttttatttctttcctggcacagctgttgtattcaaagtgttttgctttttgtttggtcagtactgttagctcatttgaagttggcaaaaacaaatacaaacaagcaaaaaacctcaaatttttttcagcagtgagagagaatagtaaagagaggcccaagcatagctggttatgtgaaatataaaatggggtgttgttctccctttaatcaatctgagcacaactacatacatccaggaatctgaagtcagatagtaaggatgtggtaccaatcctcccgagtgcaatgctaaacacttccaggtgggaattcatctatttcacttaacacaaacgcagggtctgtatttcctgccaacaagattgagtatctttccattgcttctctcagtctctgtctttgaatatctgaatgttctggcccttcaacaaattctttaaatcatgctaaggaatttcgttttatgtggacacactcaactttgat

SEQ ID NO: 27 - DNA, 2622 bp, Homo Sapiens
atgtatgacaatttgtacctgcatggaattgaagactcggaggctggttcagcggattcctacacaagcaggccgtctgactccgatgtctctttggaagaggaccgggaagcaattcgacaggagagagaacagcaagcagctatccagcttgagagagcaaagtccaaacctgtagcatttgccgtgaagacaaatgtgagctactgcggcgccctggacgaggatgtgcctgttccaagcacagctatctcctttgatgctaaagactttctacatattaaagagaaatataacaatgattggtggataggaaggctggtgaaagagggctgtgaaattggcttcattccaagtccactcagattggagaacatacggatccagcaagaacaaaaaagaggacgttttcacggagggaaatcaagtggaaattcttcttcaagtcttggagaaatggtatctgggacattccgagcaactcccacatcaacagcaaaacagaagcaaaaagtgacggagcacattcctccttacgatgttgtaccgtcaatgcgtccggtggtgttagtggggccgtcactgaaaggttacgaggtaacagacatgatgcagaaagccctctttgatttcctgaagcacaggtttgatgggaggatttcaataacgagagtgacagctgacatttctcttgctaagaggtctgtcctaaataatcccagcaagagagcaataattgaacgttcgaacacccggtccagcttagcggaagtacaaagtgaaattgaaagaatctttgagttggcaagatctttgcaactggttgttcttgatgcagacaccatcaatcacccagcacaacttataaagacttccttagcaccaattattgttcatgtaaaagtctcatctccaaaggttttacagcggttgattaaatctagaggaaagtcacaaagtaaacacttgaatgttcaactggtggcagctgataaacttgcacaatgccccccagaaatgtttgatgttatattggatgaaaatcagcttgaggatgcatgtgaacatctaggggagtacctggaggcgtactggcgtgccacccacacaaccagtagcacacccatgaccccgctgctgggaaggaatttgggctccacggcactctcaccatatcccacagcaatttctgggttacagagtcagcgaatgaggcacagcaaccactccacagagaactctccaattgaaagacgaagtctaatgacctctgatgaaaattatcacaatgaaagggctcggaagagtaggaaccgcttgtcttccagttctcagcatagccgagatcattaccctcttgtggaagaagattaccctgactcataccaggacacttacaaaccccataggaaccgaggatcacctgggggatatagccatgactcccgacataggctttgagtctaatgaaacaaaaaatattcatctgttgacaatttgccatagcagtgctaggataaaccaatcatcttaacttggctaacatagcacagtatttactgtgctaatgggctgctgtcattttatgctaagtaaggggcaaaaaaaaaaattacattatgcccttgagtctagatggatattagatgcccgatcatatagatatttttaagtgcaacatttacatgataacagtacattttgttttcttcatagatttagacacatcaatttgtaatttagggtacttacaaggcacatataaaataatttcccatgctggaaattccaaatgaccagttccagttggaaccaatttataaaccaattcctgttggaatttgggtgaattgactagaaagtctacttgagcatgttgtaatcaactgaaaaatctggggggaaaaaaaaaaaactaataagaaaatcgaaataccaatagaagccaaatccagctttggtatttatttgctggaagctaaatttacacttaaagttggagtgtataaacattttaatatatgttaatgttgccagaatgacttttcagacttaccaaatgtattgatagtgccaaaaaaaaaatctcagaaatcttaatgcagaaattatatagtctcctcagattttaatatttttatttctttcctggcacagctgttgtattcaaagtgttttgctttttgtttggtcagtactgttagctcatttgaagttggcaaaaacaaatacaaacaagcaaaaaacctcaaatttttttcagcagtgagagagaatagtaaagagaggcccaagcatagctggttatgtgaaatataaaatggggtgttgttctccctttaatcaatctgagcacaactacatacatccaggaatctgaagtcagatagtaaggatgtggtaccaatcctcccgagtgcaatgctaaacacttccaggtgggaattcatctatttcacttaacacaaacgcagggtctgtatttcctgccaacaagattgagtatctttccattgcttctctcagtctctgtctttgaatatctgaatgttctggcccttcaacaaattctttaaatcatgctaaggaatttcgttttatgtggacacactcaactttgat

SEQ ID NO: 28 - protein, 486 aa, Homo Sapiens
MYDNLYLHGIEDSEAGSADSYTSRPSDSDVSLEEDREAIRQEREQQAAIQLERAKSKPVAFAVKTNVSYCGALDEDVPVPSTAISFDAKDFLHIKEKYNNDWWIGRLVKEGCEIGFIPSPLRLENIRIQQEQKRGRFHGGKSSGNSSSSLGEMVSGTFRATPTSTAKQKQKVTEHIPPYDVVPSMRPVVLVGPSLKGYEVTDMMQKALFDFLKHRFDGRISITRVTADISLAKRSVLNNPSKRAIIERSNTRSSLAEVQSEIERIFELARSLQLVVLDADTINHPAQLIKTSLAPIIVHVKVSSPKVLQRLIKSRGKSQSKHLNVQLVAADKLAQCPPEMFDVILDENQLEDACEHLGEYLEAYWRATHTTSSTPMTPLLGRNLGSTALSPYPTAISGLQSQRMRHSNHSTENSPIERRSLMTSDENYHNERARKSRNRLSSSSQHSRDHYPLVEEDYPDSYQDTYKPHRNRGSPGGYSHDSRHRL

SEQ ID NO: 29 - DNA, 2792 bp, Homo Sapiens
agcccagcctcgggggccagccccctccgcccaccgcacacgggctggccatgcggcggctctgaacgatgtcctcctcctcctacgccaagaacgggaccgcggacgggccgcactcccccacctcgcaggtggcccgaggcaccacaacccggaggagcaggttgaaaagatccgatggcagcaccacttcgaccagcttcatcctcagacagggttcagcggattcctacacaagcaggccgtctgactccgatgtctctttggaagaggaccgggaagcaattcgacaggagagagaacagcaagcagctatccagcttgagagagcaaagtccaaacctgtagcatttgccgtgaagacaaatgtgagctactgcggcgccctggacgaggatgtgcctgttccaagcacagctatctcctttgatgctaaagactttctacatattaaagagaaatataacaatgattggtggataggaaggctggtgaaagagggctgtgaaattggcttcattccaagtccactcagattggagaacatacggatccagcaagaacaaaaaagaggacgttttcacggagggaaatcaagtggaaattcttcttcaagtcttggagaaatggtatctgggacattccgagcaactcccacatcaacagcaaaacagaagcaaaaagtgacggagcacattcctccttacgatgttgtaccgtcaatgcgtccggtggtgttagtggggccgtcactgaaaggttacgaggtaacagacatgatgcagaaagccctctttgatttcctgaagcacaggtttgatgggaggatttcaataacgagagtgacagctgacatttctcttgctaagaggtctgtcctaaataatcccagcaagagagcaataattgaacgttcgaacacccggtccagcttagcggaagtacaaagtgaaattgaaagaatctttgagttggcaagatctttgcaactggttgttcttgatgcagacaccatcaatcacccagcacaacttataaagacttccttagcaccaattattgttcatgtaaaagtctcatctccaaaggttttacagcggttgattaaatctagaggaaagtcacaaagtaaacacttgaatgttcaactggtggcagctgataaacttgcacaatgccccccagaaatgtttgatgttatattggatgaaaatcagcttgaggatgcatgtgaacatctaggggagtacctggaggcgtactggcgtgccacccacacaaccagtagcacacccatgaccccgctgctgggaaggaatttgggctccacggcactctcaccatatcccacagcaatttctgggttacagagtcagcgaatgaggcacagcaaccactccacagagaactctccaattgaaagacgaagtctaatgacctctgatgaaaattatcacaatgaaagggctcggaagagtaggaaccgcttgtcttccagttctcagcatagccgagatcattaccctcttgtggaagaagattaccctgactcataccaggacacttacaaaccccataggaaccgaggatcacctgggggatatagccatgactcccgacataggctttgagtctaatgaaacaaaaaatattcatctgttgacaatttgccatagcagtgctaggataaaccaatcatcttaacttggctaacatagcacagtatttactgtgctaatgggctgctgtcattttatgctaagtaaggggcaaaaaaaaaaattacattatgcccttgagtctagatggatattagatgcccgatcatatagatatttttaagtgcaacatttacatgataacagtacattttgttttcttcatagatttagacacatcaatttgtaatttagggtacttacaaggcacatataaaataatttcccatgctggaaattccaaatgaccagttccagttggaaccaatttataaaccaattcctgttggaatttgggtgaattgactagaaagtctacttgagcatgttgtaatcaactgaaaaatctggggggaaaaaaaaaaaactaataagaaaatcgaaataccaatagaagccaaatccagctttggtatttatttgctggaagctaaatttacacttaaagttggagtgtataaacattttaatatatgttaatgttgccagaatgacttttcagacttaccaaatgtattgatagtgccaaaaaaaaaatctcagaaatcttaatgcagaaattatatagtctcctcagattttaatatttttatttctttcctggcacagctgttgtattcaaagtgttttgctttttgtttggtcagtactgttagctcatttgaagttggcaaaaacaaatacaaacaagcaaaaaacctcaaatttttttcagcagtgagagagaatagtaaagagaggcccaagcatagctggttatgtgaaatataaaatggggtgttgttctccctttaatcaatctgagcacaactacatacatccaggaatctgaagtcagatagtaaggatgtggtaccaatcctcccgagtgcaatgctaaacacttccaggtgggaattcatctatttcacttaacacaaacgcagggtctgtatttcctgccaacaagattgagtatctttccattgcttctctcagtctctgtctttgaatatctgaatgttctggcccttcaacaaattctttaaatcatgctaaggaatttcgttttatgtggacacactcaactttgat

SEQ ID NO: 30 - protein, 520 aa, Homo Sapiens
MSSSSYAKNGTADGPHSPTSQVARGTTTRRSRLKRSDGSTTSTSFILRQGSADSYTSRPSDSDVSLEEDREAIRQEREQQAAIQLERAKSKPVAFAVKTNVSYCGALDEDVPVPSTAISFDAKDFLHIKEKYNNDWWIGRLVKEGCEIGFIPSPLRLENIRIQQEQKRGRFHGGKSSGNSSSSLGEMVSGTFRATPTSTAKQKQKVTEHIPPYDVVPSMRPVVLVGPSLKGYEVTDMMQKALFDFLKHRFDGRISITRVTADISLAKRSVLNNPSKRAIIERSNTRSSLAEVQSEIERIFELARSLQLVVLDADTINHPAQLIKTSLAPIIVHVKVSSPKVLQRLIKSRGKSQSKHLNVQLVAADKLAQCPPEMFDVILDENQLEDACEHLGEYLEAYWRATHTTSSTPMTPLLGRNLGSTALSPYPTAISGLQSQRMRHSNHSTENSPIERRSLMTSDENYHNERARKSRNRLSSSSQHSRDHYPLVEEDYPDSYQDTYKPHRNRGSPGGYSHDSRHRL

SEQ ID NO: 31 - DNA, 134000 bp, Mus Musculus
  misc_feature (11510)..(12061): n is a, c, g, or t
  misc_feature (54851)..(55040): n is a, c, g, or t
  misc_feature (62270)..(62289): n is a, c, g, or t
ggcgagttcatctccagggctctgggatggcgtggtcctcaagaagagtggtagcttctcttgcctcctgcagcctagtccagagcaggggacacggttctgattcccgtgggtgtcacctagcgtgcctgatggtgcaatggttagcgatgctgcagctgctctggctgcaacagctgctgctgctggggattcaccagggcatcgcccaagatttgactcacatccaggaaccgtccctcgagtggcgtggtgagtgtccgcagcgccgaactgggggctgattggcacccgggactcggggcggaaaacgggtaggagttgagcaagacaagtaagagcaaggcctagtttgtattgtggttgcttgtgtactgtcccggggcagatgggacagtctcttccgcacatcctcttgtcctccaaattagggcgaggtaaggggcagggtcttgccttccaggcttgcgggacctaggagagtagaaatagtttcaaaatgcaaactttacacgggttgattaagagggtcacctttcagataatgctgacaaaaagatgtcttctttcattaccttccaaagggagaagttggatctacattctacagataacccccaaacaggcctgtctgctacgccccttggggaggcggggctcagtggggtggacagcgatgggatttgtaccttctggtcctccgtttctctaggctgaacaatggctctataatattcatgaaccactgacaaataagttacacagcccccgacacgcgtacaaactgataaatgcagcatcggtttgagcatcagcccacatacagtaaggccccaacgtgagcatagaaggaagcccaaggaaaagaatcagtgtccgcaaggagcaactcaggcccgagtctctgagacataaaaggtgtgtccctgaacgcgtgactgtgccgtgatcaaaggcaagcaggtggccttaaaccagaaggagcctcctggcagctcctgtgcgttctgtcctaggaaaacctttggcgaagaggcataaaacaagatgtaatccagttctttgttcttttatttttccttcaacatatgcacacatttttaagttgtttttttttttttttttttccctcagttgtacttcagagcactctaggggctttatcctcaccaaggctaaaccacaccagctcttcctattctggagcagccagaaatgctcttaggtatttttcagttaagtaaaactctaagtacacaggggcaagcatatgcatagataggcagttggccactttgtatcttagcgtggagatcctgcctgggcttaagtgttaggaaagggcagcagcttgtgagactagctgggactcagccacaggaagcctgatccgagatcctcccagtcagggtcagcacccactgggagctaatcctttctatatttggcagacccaaatcctgacctgagatagtggctgaagaggccttcttttccataatcaagggcactttgaatatgaaaacaaccagctccctgccatactccccaggtacagcctgcaaatctggagttcaacattgcagacccagagattctccaaacacaggcgctgtggttgatgcactaaaagtataggcattctgcactagctaccacacagtctctcttcctgaccccatcacctgcaccagtagaattgcaagtgaattgtagacaagcctgaaatcgagtttttattagcaaagaagggaaaacaaaatattggtattggggaaaagagtggaggtgtcccttgtctcctgcaccccagtccagagcagagggcatgattgtggttcccgagggcatcacctagcgtgcctgatggttcaatggttagtgatactgcagcagctgctgctgggggtacaccagggcatcacccaagatttgacccacacccaggaattggcccttgagtggcacagaagtagacagtgtctacttctctgtgttagggcttctctggttatggtaaacactatgagcaaaagcaacttggggaagaaagggcttatttcgtttacctcacagattacaatccatcgtgaagggaagtcagggaaagacaggaggaacctgaagacaggagctgatgcagaggctgtggaagaagggtgttttctggattgctctccattgtttgctcggcctgctttcttaaagcaccagcactagggtttggacagcacagacaagagagtcatcatcagtaagaagaggggctctcccacatcattatcagtttagaaaatgtaccacaagcttacccatgggccattctataggtgcatgttctcaactgaggcgacctcttcacaaatgactcaagtttgggtcaagctgacataaaactggcagcagaggttaagttcatagagtcaagcgcaggaaccaggaaacggctacgatgtgcttggccgtgttttgcaacagctccatttctcactgcttgagcactgcactggtttacctttagccatgattggcatcccgcctaaccgttaagatgataatccaagttattctagttgcatatccattaagagtagatttatagcaatgcataacaggttccacatgcaatattgttctgtgccacatgtaatattgttctgtgcgttcaagcataccagccctgggaggcaaacatgttgtgctgtttctatcatatgtcagtaatctttatgggaaaatcaggaaatgttgtatcatatggccgtagagatctctgagcttcagggacagcctggatatgatatttacaagaccttcaatgagttacttagtctctgtgcttcatttgtctcaagccttataatggcatgtgttgtccatagcttatgatcttcatggcctcttcttcctctgaccaggactatcttgacaaccgtgtgtccatcgtttctcatcctcagcattgctcttggtggacccggtcctccacttccatgtcaactaaaccaaggccttcttgtggtccactttccctcaccagaagagtctttcttctagcatgtgctaaaacttgctaacaccactgttctggttagttctccattgctatgatacaagactctgaccaaaagggacttgggaaggaaaaggtttatttggcttatacatgagtcacaatccatcactgagagaagtcaaggcagggcctcagtgcatgaatcatggaggaacaatgcttgctgactggctcaggctttctgctcagcctacttcctgatatggtccaggactacctgtccaggaaatgatatcttccactgtgggctaggaccacagttatataattatccatcaagaaaatgctgcacgggcatgcgcacaggccaaagcaataaacacaattactccactaggattcccttttccagtgattctaggctgggtcaagttgtcaggctgaccactcacagactccagatactggaagggcaaagggaaaatgaagagggagcaaagtaccctgaggagagaaaggcaaggtttttgctaaaggaagttgattgagaataatcacatgtgaaactacattgaaggctaaaagccataactgtaaagtggctctgatcagggcagagtgagtttttcctcctgtggtgtcggttccccagtacacaagtgtagtgagctccatcaggctgatgtggctcttctggacaattagtgcaaagaaacaatgagggtgtctgtgaggtcaataccttgaccgtggctcttgcctaaaagaaagacagtgaagcaaggtaagtgaagggaagtgcgatgagcaatggctgaaggcctccctggtttctctctgataaatggtatgtgctctttccctgtgcagttttgggctcaccagaaggcaatccctgagatgtctattgtaatgcacattgtttatttgggaggcagttctaggaagcagggtaagggagaaaggcaatgagcagagaagggaagaagacctctatgggcaactgagggtcagattctcggggacctgtgaattctcagtgggcccacagacagacagaaagccgtgctgtttccagaaacctccctccccttatttattgtcattcctgagacattcactcttgggtgcttctggcctgcctgaaaactgggtagaaacagactctgtcaggtgagtagaacttgagtgaaggtgaacaagcactggattagtaggtgtgagtacagagccaacagcatccactacatacccccatgctgcgaatataaaaacaagaggaccaaatgacacagtctccaagaagccagagacagacacagaaactcaaacaactgcaagacagtagagtaggtgttaagacagcaagcaatggctgaagggctgcagaggagggactggcctgaggagctggagacccgccaaagagctctcaatgtcctaaaggataaataaagagttggcatatgggaaaaaaagaggtagggtactaagtcatattttatgtgaaagccataaacccatgcatcagccaccgtcaaagttcaatgagctgaaagttcccaatgagtctcttcttatgtgcaaggaaaagcgcctgctaaggtcactgaggcaaatgtggggcacactctaagctccacaagcatcttgtggagactcaaaaatactcgacactggaagcaagacaccactcccccatcacccaatcagacttcatctaggaagttaaggttgcgctaaatcagtcctagaaagtgaggggaacagacatgggaatttgcagttggggggatttatccattctggatagtggcaccaaatgtaatagctctcgagcttcctgggaagatgtagtcccaggagtagtcatgaaattggacaggaagtgaaaaaaagatatttgaagcagaagaagtcaagaaaccaactggttagagccatactagagccagagccaagaatctgatgttcacagaaatatttcatcccacaatgcacggtaaatgtggggtatatgtctaattaaaggtttcatttagaagatgcccttgcacaaaatatcagagtggttttttttttcctactctatactcttttgtctattctgtcatagtggttacgatactaaattcattccatgagctatattaataggcacagccatcagtagacaaagcactgggctagagtcttgatgtatgcatttagacgttaaagctttttctgatgaagagaacaaagaggagcttgctgctactgccagaatcatcttgtaaggaaaagtggttcagagtagtagttcccagtggaggacgagaagagacattaccacctgggagagctttctgggaaactgaaagccacaaactggaggccgagctgggaaaggatcggagctctgatgttctcccataatagcacaatttctgatacagaggtggaaacgccctctttcctgatcctagtagttcccaacaccggagaggactctgtgccagtttacatgcacctgcactggatatcattacactgaggtagtaactggcaagatagacttttctcctacaccatacatgcaacatgaggttccatttagccctaggacgatcaataggtcttcttactgtctgcagtgccttgctctcaaatcccatatgcacaagtgaatattttcataaagcaaaaatgagttcgaggccagcctggtctacaaagtgagttccaggacagccagggctacacagagaaaccctgtcttgggaaaaaaaaaaaaagtctaaatgtattgttttatacactgatctgggcaattcctatgtcctcaggcaacacgcaattctcctaactaatctggagattgggaatttaagcaaaaacatgaccagtctggtttagctgtttccctggccactccaacccactggactccatctctctcatctctgcccatcgtttcccagcatctctccctttgtgtttttcttgtttgcctcctctgattggccctttcccacactcccctcccctgattggctctttacctcactcacctcctctgattggctcttaacctcactcacctcctctgattggctctttactgcactcacttattttgcacagtagcatagatttctggtttgtctggtccttttaactcttcatcactaaactactaatctcatttcccattggtcattgtcatagtaacaagtgtcatccaaaacaggttccaagccagggaccagaaaagttaagtcacttagggaacccagttgttccctcagttcctcttctttgacccgacagttcatttatgtatcttgggtgtcctgaaacaacagtgcttttgtgcactcttctgaactcactcctagctagcgagtcctcattcaatctatcagagtagcagatttgagatatctctgtactgttccttccaaatgctttcagaaactgtccttgaaagctttttacgagatcttccggcacatagctgggaacataagtcatcgcttgaatagatggaaatgaaaagaaatactatcctttaaaaaaaaaaagaaagaaagaaagccggccgtggtggcgcacgcctttaatcccagcactcgggaggcagaggcaggcagattggcggatttctgagttcgaggccagcctggtctacaaagtgagtgccaggacagccagggctacacagagaaaccctgtctcgaaaaaccaaacaaacaaaaaaaaaaaaaaaaaaagcaaacaaacaaaccaaaaagcaccttataaatacaagatgaactaccgtatttctgtgaagtaaagccactcaagagaaatgagctctgtggtaggccactaaagaaagcaagagcttcctacgtctgtgagtggtcacatgacttgttaatttatgatactttccagtctacagttgttccaaaggagtatgttattctggttgttgggaaattgcaaggatgaaaataaacaggaaattccaagttaagatttattttcagtttcctaagtgatccacatgactcagggtatcccgcatcagcgcctatggtgccagcactagaatgaaccctgttatgcagttgaggaatccaaggcagattctctctgagtctgaagcatgtgttttgcattttgatggtccttttttcctacagcactaacttaagtcaaagaagatcagaaaaggattcacagacatgaacctagtgtagtttctcaaagttccatgttcagaaggggccccaacacatagtttaatgctccatagtccggggtcttaataatttttatctttgtgtttaggtatctcatatacgtctgataggcaagaacaagccagaggccggtgattcagttcacctggctttttctctctgggacaggctcatgaccgctacctccctggtacatctcatagccactgctgctatccacttagggtagcaagcaaactgcctgggtcctgagagtgaactgcccactggccagcaaacttacctcatacactaagacgattgagaactgatcccctatgtccaatctagatactaagggtgtgtcaagagtattatgggataaggagtgtgatccttgtgggcctgaggggaggagggctgtttctctgtggctagctagagacacacggtttcattttgcactggagtctgcaaatagtgtaatatgaaggacagtgtgctagttactttcctattgctgtgatataataccgtggtcaaaggcaacttaaggaaaagtgagttttggggggctaatggtttcagtggtaagggagacaaggcagcaggaggtcagagcaggaatccaaatcacatcttcaactttaaacaaaggagggagaggaaactggaaatgggacaaagctacaacccctcaaaattcaaaactggtccccagtaacatgtttcctctagtaaggccactgaccctcctctcccaatagtctcactaactattttaatacctgagtctgtggggggcatttttattcaaaccttcacagatggggactgtcctcaacccccatcataggtagaaggctaatcccgcagcacctcagaatgagaatttattcaggaaaaaaagggggaccttcccccaaaaggaaacaagtaaaagagagttagtatggctctacagtggtgttctcatagtaaggggaatttgggggtgaaatatgcataaaaaatagagatatgaagagaatcaggaaggtggcctaaagccaatgatagaggctcttccttccctccaggcctcagaaaggcccaaccctccccagcttggccccacctttcagcctccagaatcaggaaaaataaataaatttctatcgtttaggccacactatttgtggcagactaataaagatataaacaaatagcccaccttaaacatcatgttgtattcgctttctaaaacacctacctcaagtgtacactgactttttaagcagccacattcctaatgtactttgggatagacagctctgtgtaaacacatttgtctttagagaggtcacactgcatttccagttgacagtgaggctgttttctgtctgtgctctgttcagtctgtgtcctttcccccagggctttaacatgtgggcatttgggcagggagtttaacatgtcagtcctgccttaacttgctctttgcaagcatgctccctcatgactaagatgtatagtttcaacactggccgtaagaaaataacagaaccacagtgaatagtgagtttttaccccagcgatgtctgctgggtactttctggttaaatgaaagcaaaacgatgcagggatggcctgaaaacgaaaaggacgaaacctgttccttgctccatgtgaaatcttcctagtaagatacaaaattatggcaaagagcctggctgggggtttgtgggggctgtgagagtgagcctggatggctgagatcctcaaacgcagtctaaatggttaacgcacctgcaggggttggtaagaggcaatttgaagcctcacacaagtgtgcccagtggggctgattaagccgggtttcatttttcccccacttgtgacaaagggtattgtgtgcctcctagaacctgaagcagtgatttggggagattagaaagaaagggaacaggaacaagttaaagatttagccagaggggacctgtgggcctggggagggggtgtctattcaggttcacaagcagcaggagactaaagctacctcagagtcaaggacagtgctaaggcaatggaaagagaaggaagcactgagacgaaggagttttgtggcttgggagttttggttttattgtatgtatgtatgtatgtatgtatgtatgtatgtatgtatttgtactttagtaactttttttttagaattaattttttattaggtattttcctcatttacatttccaatgctatccaaaaagtccccaatacactcccccccccactcccctacccacccactcccactttttggccctggcgttcccctgtactggggcatataaagtttgcaagaccaatgggcctccctttccagtgatggccgactaggccatcttttgatacataggtagctaaagtcaagagctctggggtactggttagttcataatgttgttctacctatagggttgcagatccctttagttccttgggtactttctctagctcctccattgggggccctgtgatccatccaatagctgactgtgagcatccacttctgtgtttgctaggccccggcatagtctcacaagagacagctatatctgggtcctttcagcaaaatcttgctagtgtatgcagtggtgtcagcatttggaagctgattatgggatggatcactttttagttcattaataaaacgcaatagacaggagcccaaggactgttaaaagtacccaaatggtttcagatcaaatgtacactttcaacagagagccatgggaaaggaaggtctttctccctctccttttgtgcatctgttctttggaggaccaggtagaggcccctggctgtgagcatgggaagtttctcacttctggcttacagagtcctgtggaagagaaccagacttctctatcactgagggggtctggagggggtgttgcttccacaccttacaacacccctgcctgctaccccgtcagaatcaatgcagctgcgtctgaattcccgtgtttacacagggctgctgacaaatccaaatccaggaagtggataaagtgagtatgtctccagagagaaccttcccgtctttcagcctagttccagagagatgcagtccccactaacccctgcactcttctggactcaaacaggaattgtgtcagaggggctggggagacaggttaactggtaggaacacttggtatgcaaacatgagggcctgggttcaaatccccatatgaaagagtctgtccggtgtgggtgcatgtgctcttgtagcttcagcaccggggggagtggggtggacagaaacagaaggatcacgggggtttgctggcttccagcctagctccaggtcagtgagagatgctgtattcaaaggaatacatttaagaatgacagagcagaacacccaattcctttggcctccatgattacctgcacacataagtgcacatgtatacaccatacacatctatcatacacacaacacacacacacacacacacacacacacacatcaccaaactgactcaaagagaagctgcaatgccccctttgaggccagtgggtgatgtttgggtggctggactaacagaagcctccaactcagggaactggaaagagtctgacagcagacgaagatcacaagccatgacttcttaatagtttgtcttaagcattgcagtagatgtgaactgtacactggaactttctttgcccgggctcttgacacagagcaccgcagagggcaacttgctcaccgtgtgatctgttgactactcgagagctctgcacatgcctacagagttgccagagcagcggattgctttaggcttctgtttggttatttgttgcaagtcgtgtttgttagaagtgctaagaggtagttgagagacagaatcaacagttcaaaccccgtcctagcctctctctatcttcatgaggttgcttctaagagaagctctgtctaaagcaggagacactaaagacaggtgtagagaaaaccaggagggttccaatgcaagggcctcaagggacacttcctacaggtgactctagttggcagtaggtgagccgcagctgtgctgtaactcttattactgcatagtgatctggattgggttcattttctctggtggttaaagaattaaaaggcaggagtaatctcttgcgtgataggtaacagctgagaaattctcaaaccgctgtctgttggtgaagaaagacttttattaggggtgagagacacccgcccccactcctccccacccccactcctnnnnnnnnnnnnnnnnnnnnnnnnnnnnnnnnnnnnnnnnnnnnnnnnnnnnnnnnnnnnnnnnnnnnnnnnnnnnnnnnnnnnnnnnnnnnnnnnnnnnnnnnnnnnnnnnnnnnnnnnnnnnnnnnnnnnnnnnnnnnnnnnnnnnnnnnnnnnnnnnnnnnnnnnnnnnnnnnnnnnnnnnnnnnnnnnnnnnnnnnnnnnnnnnnnnnnnnnnnnnnnnnnnnnnnnnnnnnnnnnnnnnnnnnnnnnnnnnnnnnnnnnnnnnnnnnnnnnnnnnnnnnnnnnnnnnnnnnnnnnnnnnnnnnnnnnnnnnnnnnnnnnnnnnnnnnnnnnnnnnnnnnnnnnnnnnnnnnnnnnnnnnnnnnnnnnnnnnnnnnnnnnnnnnnnnnnnnnnnnnnnnnnnnnnnnnnnnnnnnnnnnnnnnnnnnnnnnnnnnnnnnnnnnnnnnnnnnnnnnnnnnnnnnnnnnnnnnnnnnnnnnnnnnnnnnnnnnnnnnnnnnnnnnnnnnnnnnnnnnnnnnnnnnnnnnnnnnnnnnnnnnnnnnnnnnncacacacacacacacacacacacacacacacacacttttacaggacaaagaaaatcacaagtcagggtaagtttaaaatatatttgtgggtataccagagagataagcggagctattctataggcccaagacacatccttagctcatgggttggtggaagccagtgttctgctaagtgactggcttctaagaggtttttttttgtttgtttgttttttccttaatatccgaggtgttagttaagatacagagtggagcaaggagtgtctgttctagaacactaaaaccagcctaagataaaatagcccctgaactacaaaagtgcaaatctctgcacaatactgagactccatcccatccatcagtcaatgcagacacagagacttaccccaggagctgttttgttcacagccagacacagcttcttctcaggaatttctgttcatttctagaatcctcaggtaacattcagcaatgaagcagccaaggccgtggagtcataaagcaatgtatctcactaagttcgtggagttatagagcaatgcgtctcattatgttcgagctctagaggctcaccggctgggcaccagcctctggtcagttctagtgaggagatcactagggcaccgcagacggctttgcaatggcagaaggacggtcactggcaagacaggaaatcacatgagcccttggaagatatccatgccacaccacctaccttccattgattgcccaaccctgccattccctcccccttggtgctgctccccggcttgcacatatgacttcagtctccaatgctggaccacaattataatttcaagactgttcctcaaatccattcacgtaccatctctctccacctgaatcagagcctctgaatcaggaacttggttattggtcggtctttcattgtctgggcacctaaaaggatgctaggcacacagaagttacatggcatatggtattgttgactctattatatctatttgaccctcgatcatcttttaagccacagcctcatctgtgtcttattccaaattatattatattcatataatataattaataatataaaagggtttttttttagtaaaattcaagatcttaataggatgacccccaagcacaatagagtcattctgacttcacatgttcctgctgtccaaattttctctataactctgcttgtcttaactcaaagtctgactgacttcatcatctctgagctttagtgacactctctgtgtcctgggtatcctgtctgcaagcttcctcagttgtcaccaatatatctattgactcatgcccctgctattctgaacactatctgacaagcagaggcatgtctcctctcagggaccagtgcctacccatagttacaaatatcaagtgcctggtcagtatttcttgggtgaaaatatgaggactgtgattctctgatattcaagtccagaacaatgccctttacctctggcttctgccatgttggacgtctgtgaggtgaaatataaatgtgaccatgaactctaagtctcttagtcctaacttagccttctatctgcaggttcctaacatgtcactcacaacgtgtttgttgctggaaaatttcaagttgcccacttgagcaatctattagctgcttggttcttctttctcaatgttttgacaggatatatgaaaataaattcacagtagagtacagtcctcagtaaacttcgaattcatatcctaagagaaaatgggtttgggatgaaactaaaaaggtaatgaatgaatgattcaattaaacagcttctccaggcctgtctgggcagagcttgtatccctgctgaactcagtgttgctcagcttatcctccctgggagacgggcaagcacgtgtccacgcatgcttcctacgtgggagttccgtctacttcctactgacagcagttgaaggctcagttaagcgtctttttctgtgatcagttttcttgatcctggctttaattacttatttttcacagactcactttgagtagaactggaataatgtctcttcatcgctgacaggacttccttcattactttagttagggcagctctcaagcttccagaacacacagattgaaagtttccacggacagatagttagactaacaagtccttggcctccaggcctgtccctcccgcatggctggcaccaatgagtgtttgctgaatgaatgagtgcgtgaatgtcccagctgccatcatgagaacaataccttagaataagcagaacagtcagtcagggtagagctcccttctcccttcttagaaactcagaagcagaaagaggggactagtctgcctgcgttttaaaggggtgtaaattagcttgtaaatttcttctagtaatccatacctcttccacacccaaattcataattaagaagggaagaacataacacttgcctgtaaagagatttagtgatgctggcagtacttcattaatcacttaatcactgttcaagcagaactgatatcttgacatatgtaatcaatcttgattcctcccaccctagatttccatcctttttttcaatccaacaactgcatgcgctaaggagcagtggcctctttccacattacggtgttgttaggggcaactattatgagcacgcagtagcaacctgaacagtgatgcttacagtctgtctattcgtggttcactggaagactgttttgttgttagtgagtttgaggagattgatggtgctggaagccaggtgtggtagctccctgctgtgatcccagtgcctttgaggctagggcaggggggagctcaggactagcctgtgcctctaataaagtagaggggccgttggacagtcacagagacatgaaatattaggatcagattctgatgtgacttgatgggaaagtggcttgggtcgtctgttagcttggcttattgtgaagtagcacgtctgttcagggaggccagtcatacctactttaaaatgcatacagattcgctttcctgaagctatgttccatggagctgtcatggcttccagaactcagcagcaaggcatgtgctaatctagtagtatttttatgccttggaaagggttttgatgattactggtatgattctaccatccctaattctacaactctttcaccttaaatgcgtattgatttgtatcctagggttttactgctgtgaacagacaccatgaccaagacaactcttataaggacaacatttaatttgggcaggcttacaggttcagaggttcagtccattatcatcatcaaggtgggagcatggcagcatctaggcaggcatggtgcaggaggagctgagagttctacatctctatctgacttccaggcagctagggcgagggtattaaagcccatgctcatagtgagtgacaaaggtactccaacaaggccacacctcctctaacaaggacacacctactccaacaagggcacacctccaaatagtgccattctctgggccaaacatataccaactgtcaccatttggaagtgtaaaacattattctttcatcccaaatcccagtgatgtgcaatttctttgtttacttattcatcctgcctcgaatatactgcttgttcatgtgacacatttttcttattttttagtttttttttctttttaaggttcagtacatactttatagtcagggagtatggaaaaacaaaacataaggagtcttaataataataattgtatatgaacttgaaaatgtgagacaaggatttttaaaatctggtgctttgaagattatgtttcctccataatatttcatgagcactttgccctcactgtgtgtgattaaaacaaaagcaaaagtaaacttttaactattgacaatgtttaaaaagaaaataagtcttcagcagatgttcagagtagatctacgggtctacagtgggctctggctctcagaagcaagatggctgagaagttgagaagtactactaagtcatgtttcctggggccttctcagttgccgatggagtcttgcatggtttatttatttaagagactgtctttcacatccttctgagattcatagtgtacacagttccagttcaaatagggaaagtgagactgtcagagatcaagtcattgatccacagatacacagctggtcagtggtgggcccacctgtgtccagagttcttacccaatgactcaatgttttcatctgagatgcatgaattgagacccagtcatagaaagcagagctggatacactcgaatatgctcatcagataggagctgagctacaggatgatcacagtagaataattatcctctattgagaaactaatgggactctgagctagctagaaagcaattagcagattacagcagaaattaggacttgcattctgcccgggcatgaaaaggtgaaaggaaggtttggaaggaaggctaatgattgaaatccacatcacactgacgagggatggattttattttgaacgactgttactaatagccaccctgagatggcttccattagaaaaacaaatttcctgatctaaatgaaatctcccctagaaccattcattctctacccacgccattggttctcccttctcttctgctccagtgtatgataatcaaagcatttttctgacccctaacaactcctcaagcatatggttataagaaaggttatcagtttttaaatgcggcacagctttcaatggatacgttgacaatgttttgaacagagtcttaagcgatttgtgttgctataaatcagttttggaggaaaccaaaagaacttccacccaaaggaggcattaacccctcagcccccatgtgttaggagggtcgtctactctgttccaaacctctctacggctcgacctgtctctgccgttccttttctataactcttgctgccctaaacccagtcatttagaggaaactgataagttccctgcagagttttaaagaataaatgggaagtaaaatgtaatatgggagcctgactgagaggaggacaaacgaactcgtggatgtgaacaggaatcctgagatagggtcatctgaaagcccagctgccgagagctctaagatgctgatgtgtccaatcagtgtcagacattggttgagtttagaccacagaattaagacagcactattgtctttcgaatacctgtgacgaaatgtatgcatagttatgaagtagatgactgctcggccagcaagcaagcgttctctggctggatcctaccagctttttcacaggagactgacccaaactagggagactcaagggaacatcctgtcatgtcctgtgtcattttctactgctgcctctgtgctccaggcgtcttttgtagcaagggatcaggcattcgattgatgccactggctgcatgcttgctaggctactcctgatggagtatcagctggtccaccttcacactcccgatgggtcaagactgaaagcagcgtgcagaagcattaagctctcgccagcactgaatcctctctcaaagggctgcagagaggcacttctgattacaccattaccttgtggctctttgcaggaacatgaggctagagatttttcacctcaatggctctcgagtaaactgtcatgttccaaatactgaaaataaaagtaataaatgatggccaccccctggacacccaatgtccctcttgcataccattgctctctgtttaagtgttataagaggtttgactgtcaggaaaccctggtcttccatgcccaggagcctcttaggtcagtgatctcccattgttgccaataaggacgctttcttgtgcttgctgggaaactattttatgcaaatgaagactttctggtggactctatccctcaactacaaaaatgactggcagctgtgacttatcacggcttagatacacacactgggatcatcacagccctagctaattatatatgaaaattgcataccacgtctttcatttattctgttacagataaaggaattttcattatccagagcgagagcctgaagacatgcattcaggcaggtaaatctgtactgaccctggagaactgcaagcagccaaacgagcacatgctgtggaaatgggtttccgacgaccacctctttaatgtgggaggcagtggctgcctaggcctgaacatatctgctctggagcaaccattaaagctctatgaatgtgattccaccctcatttccctgagatggcactgtgacaggaagatgatcgagggcccactccagtacaaggtccaggtgaagtctgacaacacagtggtggcaagaaaacagatccataggtggatcgcctacacgtccagtggtggggacatttgtgagcatcctagcagaggtaaatgtagtcatcaatatatagaatacatagatcctgtttcccatataaaacacatgtatatttacatatacatatctgtgtaaaagcataattgtatatttatctataggtaaatatgtatgtatacacacatatacatgtatatacacacacacacatatatattatgtatgtatgtatatacatacatgtatatatacatgtgtgtgtatatacatacatgtatatatgtgtgtgtgtgtgtatatatatatacatatatatatatatatggtataatcttatatgtaaaaggaacacactgagcttgttgtcatgttgagacttctggaaaattttagtagttttcttacttatagtaaaaggattattggaatcttggaaaagatgcaataaagaaatgactatctcggaatttaaagataccgaaggaaagtacttaactagctttggggatcaatacaaagaagaaccagcaagagagaaaaagaggagggaaaacagaacgtaacacgttagaagggaaggttttcacactgccaggtataatgcacccacttggcactgcttctctgacagtagaaattcagccccaccctgggggtgtgtctctgggggcattcagatgcttctaagcctgactgtcgtccctatgacagtcatgctacaaggtgctggaagataaatgagacactattgtcaagggttatttgttgcgcaccaagcatggactgtgggaggcatgatttatagggagactttcattttctacagttctcttactttttgacatttttttaaaacggaaaaagaatggaagatacagaaataaagctacacagtaaaatgctgacacgtgtgttctgtccctccacagatctagtcatttgtacactcatccttccatctggcactcattattttttcttgagcgctgactatggatcaggcacaatgttaggcacttgtacgaaggccaagacagacgtcgtccttctcctcagggttagaagtgcagcaagaaagtcctaagtcctaaggcaggaccttctgttgctgatgtgagtgaagagtcagagccaaggctaagacgtttttctaggcttgcataccgcaataaagcaagagctttatcagcatgctgacacccgcacgattctcgggaagagcttgatgcttgctttatgttagcattttaaccctcggcccatactgacaacacccatgctgtttagtgaaaaacaggggactgaaagagataaaaggctgggtcctgaaatatctctaattcctatgaaaattggcaatgtgctgtgaactcggttaggcccttgccagttgtgagactgtacagaaatgtccatagctgacccccttgtctagatgaagaccagatgacctcattgatacccacatcctagaaattgccagctgaatcctggggggctttaattgtcacagtggccaaggatggtggagtctaagcaagtagtcagcagatcagctctgcatggccatcttgatgagaataggaactagaaactggtcgggtgggttgaggttctgagaatgtctttgctggagacctggaatgccagaggaatgttgattcctgcttctctttcatctccaaaaagggcaggtgaggctatggtaactgcctgacagaccaagaggaggtgcggaacaccttgtggttgggcaactagactgaccagttcgcctttctcttcgtatctcagcccagttttgtccataagtcctttaaagggcccagactggcagctggatggtacctggtttcctaggagccttcctgcgttatagccctgcccaccactgccaccccttaagccctcacctgtgaatctaaaaataggtttctaaaactctccctctttggctgaaatctttgaatttcagtctttgaattcgggagacaagcactgtctgagagcactgggtgaaaagcagctgtgctggccacgtccgagaccctagcaaccctagaaggacactcctgttaccaaggaaacctcaatattgctatggatagaagctgactcactggttagcccgagttgctctctccattcggactgtcacagtgtacccagtgatattgtgttttttgggtttttttttgttttgttttgttttttctttttaagaatagaagtctgatttgtcactttctcatttgaaacctgccagtgacttcccaccaccctcagaataaagacagaagtacataacagcaatcggagaaactgcttccgggagtccactccctggggccgtctttattccacaagcactcctttctccagctctttagacttgatgctccttctgcagggacaatttctttccccagacgagcatcctcacttactcaatgtcctcacagaggttttacaacaaccatcagatgctggggacactccactacacacacgatcttctcatcctgttttattccgtcatgagatttattattactcgaaactctatgtttgcgtatttgctatcacttcttatctctccaccaagccactttgttagcaaaaagaaacttctacggtgcactaccatattcccagtgcaggatatgttcatgatcaataagtactcattttttaattttaaaggatttatttattcttattttatgcatgaatgctttgcctgcatggatgtatgtttaccacatgcatccctggtgcccacagaggccagaagagggcattgtatcccctggaactggagttatgatggttttgagtcaccatgtgggtgctgggaatcaaacccaggtgctctgcaagaggaagaattgctataaaacatttcaccatgttgccagcccccctaaatatctattggctgttgtgaaaattccttccctggggagacataaccatctaccccctacataagatcccaatgacaaaccaatggtctctggagactaccaaagttaaccccgagcaagcaatgctttgttaggcttcttacatagcatgggtgagggggcatagcctggagcatgggtgagccaaaagcagccatactggaaggtctgtgattaatgtgaatgatagctctgccaggctgcatgagtgaacccctcgtcctttggccttccccagcctatgcactcaaatgcctctgtgagtctctcagaccagttatacaaatttgtatgcaaatagcattgtaatcataaaaagaaaaagggctgtaagaatatgttctatctgggtgtggggggagggagtgcctcagcaggcccatgctgagacatcccttctccctgagaggccagccacacactatagcttagaatagagtttgtttagggcaaggggaggggagctaagagggtagtagaggcagagagaggcagagagaaggagaaagtggagaagtagaggccagccatgaatacgtggagagagtggggaagggaatggggagcaaggggacaagaggaggcaagagagtaagagagagaggaggagccaagtagccccttttatagtgggccaagcctacctggctgttgccaggtaactgtgggaaggagcatacctggctgttgtcaggtatctgtgggggtggagtccagacagaatactaaatagtgtgtatgtgggtggggtagcacagttagctactccggtgagagtcctatgaccttccccagcccttccttctatcagggaccatcaatggttcacaggcccaaagaggacacttctgatgtggtgacatctgttttgctgtaagactgtaatctacaatgtcaaccaaatgaactggtagacggccataaaactagagttcagacagtgaggggtgataggggctggcaaatactttaagggaaaaattccattgtgtcttcctttttatttcattcacaaatttgtatgctgagcaacagccatagtaaacaaagagctagataaacatagggacaaaccatttgccagtgcttctgaaggcctggtgtgtctgtgtaagctagctggtgaggccccgagggctcacagagcttttaccaagtgctgtcctggggggaagtttttaaccagtaaaaatgcactaatagatgacactttccccagaagaaactgacaccggctttgactgtaaattctttttctctcctagatttatatacgttaaaagggaatgcccatgggatgccttgcgtgtttcctttccagttcaaaggtcactggcaccatgactgtatccgagaagggcagaaagagcacctgctgtggtgtgccaccacaagccgatacgaagaagacgagaagtggggattctgcccagatcctagtaagaataaatacgtctccatatgtcatgaatgaatccaggatgattggaaacttatctgtagtgaaggaaaaacaccagggctgacggttgatgtctgaatgagcctcctgattccaccagtctagattttgattggaggtttgtttttgacttgaagagacaattctaattcgtaatcctttccccccatctacattcaaaagatgctaactagcttctcttcatcatgctcgctcagtgaggtgcataaagatagtttagctggaatcagatgatgctattctgtggacttgccaatggcagttccccagcagggtgcttccaaaccacaggagtgcagacaaaaaccagccatcctttccaaccagcacctcctaggagctgccatagtgtctccccatccagacggcttatctggaccactgtcaagtccgacatcagctgccccctgatgacctttctggagcatcacagttacgctccctactcatcaaccacgaggtctcatcttgaattctgaatttccaacccttccgtgtaggcttaaaaatggtttctcgaattgttaacctaattttcaaagtccagtgacagctataatagctgatatatatatatatatatatatatatatatatgtgtgtgtgtgtgtgtgtgtgtgtgtgtgtgtgtgtgtgcgtatatgtatatgtatatgtatatatatatatctacacatatatatactacttgtatttttcaggcagtgcatggttattatttttcatttaactaaaagatttcctattgttcctaagttttgaagggtacgtataacttctgctgtctgtattctggctcctgagaatcagagaatatctcacctcctctccctccatgcctgcctcccttccatgcatacaataaaatacaacaattaattaaaaaaaaagtaaactaaagagctaagtcgcaatggtgtgatttataagctatctgcagagttatttttcagtgtaagagccgcagggttcggtaaataggaaagagtggcgtttttaaatttagacaaaccaagatgagtccaacttcctcccagcagtgaatctcaaggaaagtgcctctgacaaagtgaagaccatagcgttgcctattaggattactgtgtatgttcaatccgacagtgcatcgaaaacacggagagtagccggcgctcagtaagtactcatggggacaggctgtcactattcagcacacgttttggcagctctgggtacggaacctggaggctttatcaggctaaggcaagcactctgccactgagctacgtccccatccttgcagcatgcgttcctttacttctgaatgtacgatctagcctcaacgtggcttgtcctaccactagatggggaagagatagtggtaaatggtaagaaatttaaggctttggataccgccctcaaagaaactggcatctagacttaaggcaggagggacagtcttgctctgcaccagaaaatgcagacaatattggagctgatacactaaaatcacctgggagaagaagccccgtggtccaggatgtgggacccgggagactggatagttcaggatgtgggacccaggcatctgcatttttgacaagtgctaaggtgagttgagtacatgtaattcctcaccagggatttccccgatatgcaagtaatctcaggctcactctagctacacaccagaatgtcgtgaagaaatttaacagccataaattagtttacctcttatggcatttccataaaacatcaacaaagcaactatgggccaaaagactttatttggctcctagtcccaaacccgtctacagtgaagagaagtcaaggcaggaacctggaggcagaaccgaagcagaggctagggaggaaccctgcttactggttcacacctcatggcttgctcagtttgcttttttatacaacctaggagcccctgctcagggcgcccacacacattaatcaagaaaatgctccacagacttgtctacaggccatactaatggaggcatttttctcaattgtggttccctcttcccagatgaccaaagcttgtgtcaagttgacaaactgaccagcacaaacagttttcttaagttcctgagaagaattttgtcatcccaccctgtcatttgtagccaatttcagttccctccccccatcccccgcccccttggaagcttggttttcttgagctttgggcttttttttattccctcaggctatttgtttggctgaggaggcaggggtagagagcagggggtgctttctctgcccacctgctcaccgctccctgacctccccacagcagcagagaatgtgtggacatggtgtgcattagagccatctttctcccttccttatagcttttgggttctggtggccaatataactcaaaatgacgggtcaaggaattgcaagctgagttcactgagacccgtttccaggagtcaagaagtagacaggacacagagagaaacgaaacaaagattcacactcctgtatctcatgtaattttacaaggactatattttttaaatctctatgtataaaatgatggttgcctttagtaaaagttgattgcaaaggagtaagatttaaacttaacacctggacaaacatactagccctaagagtgtagttaatccctgtcaggaaatgagcataacaaacagggttcgactctggcttgtttagaggcaaagtctgggccacatcgaccctgtctgggttgtgtgccagagaatcccatttagagatacttttggaattctatcctctggaatgatccaattcacccctggtttttactcactatagttttgatcaggaatttgaatgatggaacagaatagattagtaccaacaataattgccaccctcatcagagtccctaaaatggatcagcagtatgttacatcagtaataatttacaaaaacaatcccaaacaataagaaaatgtgtgcttcaaagaacctatcaagacactgaggcaagcagttaggttgttgaattcttgccttgaatgcttaatgccccatggtctattctcagaacactcgcctccgaagacctccttcaaatgggagaatatattcacaagtcacttgctcatagagatattgtaggtagaatataaaaagaatcctgattttatgtaatccaaatgttcccaggagtggtatcacctccagtgggctagcggcttgtcttagttactcttctattgctgtgaagagacactatgagcgtggaaacttataaatgaaagcatttagctgggggattgcttatggtttcagagggtgtgtctgtgaccatcatggcagaaagtatgtgtgctgtcaggcagctatgacactggagcagtccctcagagcttacatcttgaaaagcacaagtgggctcttgaaacctcaaattccatcgtcagggacacatctttcccaaacaggccacacctcctaatccttcccaaatagttcaccacctgggcattggagccaaagaaactttcagttttctaactacaaaaggttctacaaataaatactataggaggatttctggagataaaccagcgttcctcagaacttgtaaaaccagttcccatccatcaaaaggagacatgacatttcccttacctctgggcagaggagatggatggctccattgacattgtatatcaaagcccatatcagcttccagaaccctcagaatcataagtacttgttacagatttcaaagtccacactagcatcctagctcctctcacctcctcctctgccctcagtccctccagataatagacttccctcccctagctactcatcgtcttagaacctgtctgttctcacctcatgccctccattctctatctctggttattttacctcctctcacagagagctctggccatgttttctctctctctctctctctctctctctctctcataataaaaactttccccttaatcatgagatggagcagtcatgtcagcagtttctttactgctcaacactccgggaaccaaacattcaaatatgagagccctccttattcagtctaccacagccctcccaggtcaaccattaatgaagaaaatgccccacagacatgttcacaggccagcttcatggagacaattcctcagttaagggcccctcctccagcatggctctagttatgtcaaacagacaaactgctaagtagcatatcaaataacacatacgattaggaagtttttttaaaaaatgaaatactgatccatgccacaacataatgactttgaaaaacataattctgagagaacgaagtcaggcacaaaataacacattctatataatttcagctatatggaatggataaaagcaaacatatagatacagaaactacattaatggctggcattataatacaataaagcgaaatgggctggagtcaggtagcaatgaggaccgcaagggaaatggggaagtcagtcctcaagagtgctgtgttttttctttaaatgatttaatcattctaaagcaattatgatgcttccacactcttctgattatactgaagattgaattatggaatttcagtgggtgaattacatggcgtatgacttacgttgcaataaaaactttaggagatgaggaattatagatagtatgtgcataaaagtatgtaacgattggaaacagagagaaggcaatagctgggatagggagaacaaattagggagtttttttttttactcctttttaaagacagaagatactcagccattttggaatgcacctggaaatggggtaactgaggcactaaaggtgcagggaagcgaaatcacttgatgactcagatgtggtttctcagaaaacaaaagtggggctctgaccaaacactcaccaattaacctgttttagacataagggaaattctcaatatgaggattaacctgtttctatagaagggaaattctcaataggaaagcataggtccaaggaagattcaatggctgagaccttgtatgtctaaagacgtctgcagtatttcctagctgatatatgtatttataaatgagttcaatattaaagacaacagaaaacaaggttgtccccaaacaatatttaagggaggggagaggagaggaggaagagaaaggaaaaattttttaggaaccactttgctggggtacctagaatatcctcattgagatgaaatccttcatcattgagatggaacctttcacattaagatggaagccatcattaagacggaatccttcattgttgcctttaggtaagatggcctgagatggccaatacgctgtgtgtagaccttagaccggtcaggttcatctggaatgaccactgagaccctgcaatgaattttgtagcagaatttaaaaaaaaattaagctgattccctgctctcagtttcggaggtcctagatctggtatggggctcaaggatacacgtttacaatttgttccaggctgcaaacctgatgctccgtgaaacaaaccctaagtaacactgtctttaaggaaaaaacttcaaagccttttctaaggcaggcatgtctgggtggccagtggtgactcgagggtggtaacaggcagaagttaatcctgggaacagggcacctgttgctcactcctgacatggagaaagacctgacagtaagccttgattataacacagaccacagccacatgcatgataagaaaggctgccacctgggttctgtttttgtcaagagctggtcctgccctttcaatatgttcttctttccagacttatagctggggtaatgttagatttgacttgggtttatactatctgtgatgatgtcgaaggttatataatagagaaacttctgtcaaatgtttgcagtagacactcacattctccttagaagtcagttcgtttagcattcacgtttgtttcactcgggtgatagaatttatagttctgtgcaggcagctaatctccaaagggctgcttctctccatgggctgcttctctccatgaactgtgttactctccgcatcccacctgaagttgccaatcaactttcagggtctcagcagtcacaccaggggaacatggccaatctaaaatctaaacctagtgtattggccataccagggaaatcctaccattctacctaagtcaacaatgaaggactccatctcaatgagagcattctagccaccccagcaaagtagtttctaaaatttccccttttcttccacctcctcttcccttccctctcttaaacttttttttggtgacaatcttttttttctgttgtctttaatattgaactcattcataaatacatgtatcagccaggaaatgctgtagatgtccctagctgtaaattattaactaacttccaactagctgctttggttcttgaaaaggtatgcagtaactagacatgaaatcaaacttccacatttttcaagggagttatcgaagtattctaggttaaaaaaaaaaaaaggagcacaaaaaaaaaaaaaaagatttcattgtcaagtcagtgtgacatatattgaattagtactaagcaggcttctacagcccaggaatctacatgatggatttgaaaagcacaccctacagtcgtgatgtaccaaattgtcatgggaagtgtcctgctgtcagctgactttcaggactatacttggaggaaaagaacagtctagactgcagcatgctgcctgtccaccagttacacacatgctaaaatacggctcacatttcctacacgttgtacgactgagttcgagttcgagaactggttcaccttgggggttgggttagaacgttagcaaaagcacacggctaggcctttgttgcctgtcatttcaagaaactccagatttcagatctacacttcatactctattaaatttgcttttaagcatactatgaaatcttggccagtatcttaaaagtggattttgttcctgtttgtctgaaagaactacttaaagctggtatcattatccttatgccgggtgaaaccgtgtttgtgtttaacacatagctcctacgccacaatcactccatcttggcagtttgcttttagtttgggaaacagcattaaagtctatcccaagaaaatatttaactcccatgtctaacatgaagttctaaatgcttgcttattaaagaatcaaaatattattttcaaaaaaaaacctcatttcatttctttctcttaaaactaacttctcttattcccttgagagtatcagagattctttaccgatcatctcttgagcttcctcaggtaaatttaggatgtgtttaaccgtaagacattaatagaacagcaatgcggatttcacataaagacctagtcaaggcactgaagtttgagagcatgcacgctggagccatcttatttgaatgcatcttagatatcactgtggaggggaacactgtcatgagtgtttttaatggactttttttcagcctctatgaaggtgttctgtgatgctacgtggcaaaggaatggcagttcacgcatttgctaccagttcaacctgctttcgtctctgtcttggaaccaggcccattcttcatgcctgatgcaaggaggtgctttgctaagtattgcagatgaagatgaagaagatttcataaggagtaagtacagaaatggtgcacgtggataataatgcaataaaatggctactgcgggcagttctacccttggatgcaaatatatatatatatatgtatccttaaaattgtttttcttttcttaatatagcccaaattttaattctgaattctaaaaccttcattttgagtgtgcgtgtgtatatgtgtgcatgtgtgcatgtatgatgtcggaggacatcatatgtcaacatatgtgtacatgtcgacctgcagatgtcggaggacagttttttaggagtcagttctctccttcaagcatatggattctggggatcaaacttttgtcatgtttggtagcaagtgtccttgcccactgagccatcttgctacctctctaatcccgaaattttttttcttttttttttttttttggatttttttattaggtatttagctcatttacatttccaatgctataccaaaaagtcccccatacccacccacccccactcccctacccacccactccccctttttggccctggcgttcccctgtactggggcatataaagtttgcatgtccaatgggcctctctttccagtgatggccaactaggccatcttttgatacatatgcagctagagtcaagagctccggggtactgcttagttcataatgttgttccacctatagggttgcagatccctttagctccttgggtactttctctagctcctccatttggggccctgtgatccatccattagctgactgtgagcatccacttctgtgtttgctaggccccggcatagtctcacaagagacagctacatctgggtcctttcgataaaatcttgctagtgtatgcaatggtgtaagcgtttggatgctgattatggggtggatccctggatatggcagtctatacatggtccatcctttcgtctcagctccaaactttgtctctgtaactccttccaagggtgttttgttcccacttctaaggaggggcatagtgtccacacttcagtcttcatttttcttgagtttcatgtgtttaggaaattgtatcttatatcttgggtatcctaggttttgggttaatatccacttatcagtgagtacatattgtgtgagttcctttgtgatctaagtggatcaaggaacttcaaataaaaccagagacactgaaactgaatgtgttttctatgaacactgcaccattctctttcacactacttatgcctcagttcccctccccccatcttggggaagagaatttgaaacaatagcacgtgacccatgtgagcgacaactctggcaggtggtgcagaggagtttttcagcataagtactgattcttgtcccctgcagaatttcaacattcaattccattggtaaataattacatagtctacttgttgctagcttatccatcctggtgtccaggcccatcacaggccctttggtaaataccaaaaccttaacattagtggagaaataaaaaaaaaaaacactagcacaacaagacaatagtgtttcaaagggccagcagcaatgggaatgggaaacagctttactttgttcccacgtcctgctaacgtggtccctttcccttagggacctccattcaggcaaaactgcgctaagaaaataactttacggatacccaatatgatagtgttggagatgtattaaaagacacatagatcttgagatacagggtcaaaacaaaatttcgaagtggccatttctggcatgtttctggaatgtgctgtttggggaaacagctttactatggtgtctcagcctgctctccttaaagcaacagcatgacttgacactggtaaatcagatctcatggaaatgtccttctagataagctcagcattgtttcatctgatccaaggatgggatggagacaatgctgggagaattttaccttcatttctaataacacttattttaataaacatcaaataggtctttggccagaaaacagaaacaaaccaagatgaaatacaagctgcgtttatcaaggctgatcagacaagtaacagctaatgaaatccaccagtgatttagttgggtcccagacaagcccccacgttgtcaatggggaaaagcagagaagctcgggtaccctccatcctccacgccagcctgacggggttccttcccgttaggaacctccattcagacaaagccgagtttgttgctcaatgaaaaaaacaagaaaagagtatataggtggcccaatatgaagcagaattagagatttatttaatgacattcttaacatgatcttgaacgcaggggctaacagaagaagcacccaggaaaaaaataaggcagacccagacattgataccagcttctcaagagagtctctatctagttatctttgcaatagatatttgtagaatttttctggactcaagttacgtctctaaagattgctcagaaatcattcttcccccatttcaaaacatttctacaccaatgttaaaagttcaagaattttcttctggggctggagagatggctcagtggtttagagcactggctgttcttccagaggacctgggttcagttcccaacatctgtgtggctgttcacagctgcctgtaactgctgctccagggcatcaacgccctcacacagatatacctgcagacaacacagtagtacgaaaaacaaataattaatttttttacaaaatgaaattggtatttgttttggtttaaataattttcttctgcacaaagttataaggtgatttgtaaaaggtactgtttgggtttaggaggggacggaagtgtggggagctcaaagctctatataactttaggctaaatcatacacaacttgtttatctttgacaaggtagcttgagggaaaaattatattgtctccgtaaacaactttggccctctcagtggtcaatggtgcctgaggttccctgtctctgtccacaagatggataaaccaggcccaggatgaaagactttttttccatgctttccttccacgcgtccaccatttttcctatctttgttttctgcctcaaacagaactgtgaaaatgagctggaaagtgtgtttcttccacctgaccaggtagatcagtgggtagagagagagaggtgcttgtgcgcaggtcagatgacctcagttcaatcctcaatcccaggatgcagcaagaaagaagcaagtcctaagagctgtccgtgcccccacacacgcaccactgcgcacaggcacctccacacacaaattaataattctttaataataattaataatagaaacattaagaactatcaaattcaactgatttgattgagtttcgggcacaattttttttttctcaaattcatctgtagtaattttagcctttgaagttcagccatacaaaaaggaaagcaaatggagaaaaatatctgccatagttctacaatttagggctagccatgctctgccaaagtaagtaaatatgcgtgcagacatactgcagtggctgctgaggtaaaccccgtgactaagagtaaggagaggagagggtttatgggtttatttccttgtacacttacaggtagtcatcactgagggaagtcagggcaggaacttagagagggaactgaagcccaagtcatggaggagtgctgcttcctggctttgtttagcctgctttcatataccactgaacaccatctgcccaggggtgccaccactcacattgggctggaccctcccacatcaatgatgaatccagagaatgccctacaacaatctaatggaggaatgttctcagttgagatctcccccttttcagatgactctggcttgtgtcagattggtaactacaacaaataagacctaaccagtagtatctatagagatcagtacagtataaaaaaacaaggagcctgtgtagtccaaggtactttccagtacacggacagacagaagagagagactcctctctgtgtccgagtcctgccaccaccaccactgcttgcagggttactcaagaagtgagttagcctcttgacagttcaacttcccccttaggaagtggaaatcatgatagtaactagttggtggtatacaatgtatcttataatacagaggaagccttaggaaactgtctggtgtgcataacaaatggtgtgggctgaccacttaacagctgtgtgcataattttataatctgcttatttaatttacctgtatgtattcctgtttgtaaagatggatatatagttctgtgttgtgggatacgtgtgtgtgtgtgtgtgtgtgtgtgtgtgtgtgtgtgtgtgtgtgtgatgtatatatgtgagtatgctgatgcatccctgcacacactgttggagagcagacccagatggcaggtgcctttctgcattcctccctgccttactctcctgagacagagtctttcactgaaccagcgtttcacaggctcagctaggttagctggccagtgagatcctggagtcttcctatatttgccccaaaatgttgaggtcacgagcttactagacatgtccagcttctgatgtgggttctgggaaggcaacctcaggccctcatgcttgcagaatgagcactcttactcaccgagacatcttctccggcctgcatctcattttaattattactgagcagtgtaacttgtagtaacatgtcactctctcaatctgcctttggagtaggcagataaaattactttgatatttgtttatcgctgttgccaaccattcccacacatacatgtgctgtgtcccagttactttgtctgtattcttataatgaggttcactggatggtgaaagaggcggacttacagctttacaaaggcagagacatcgtccagaaggactgagataaatggatgcacagtgcctgttcaaccttcctccacagctctgcacaagtggggaattatcgtcaaaactaatttgaatgaatcttcttggaataaaatgacaatttcccaaatcattactaatgtgtaatgagtcttgtgcaaaagcttgcacaccatttatgaattacagttgttatctatcttaactgccatggtttctcatgggagaatttgtacctattcatcaagcttgaatagcaatttaaaaaaaataagatatgtcaatggcttttatttaaacatttcaattctataattaggctttcgggcttgtttgggaaaatagaagtctattcagaaagacagaaactgtcctaaccaaagtatttttagtggtgaaaggagtctaatatctctagctagtcaccaaattgtgagatgaagaattatctaggctgtcacaaatgacaagaaacatccaaaagaatttagtcctgagtttgtattcatgtgctaagggtaaacttagttaaaaaggtaagtagactaggggagaagggttgggtttatattttgtctgactgttttgttgggtgatattttgtttttgtttttgtttctgtgtgtgtacttttaaacactaattacacattgtatgatccttctatatgttttagtaagcacaattgcatgattttgagtacatagagtaattctaagaataattaatatgtgaattatgttatttacaatatcacttctccatgtcctatcagtgaatcttccaatctaccctggcctcatgggaaggttaacttaaaaagagactggatataatgtcacaaaaacttggatatggagttcatatataatatgttctatttagtgttagagcaccttttacctttttttttaagtgtccagcctcatcaaacttccactgtgtattgaaatgtccaatggttgaggacttaattgctgactttaacttaattgttgagcagcagacttaacatgtgaatacacagagtccttgtcctgataaccacacagccaaactgaggagcctgggagagtaaacaggctgaaatgataggaaggaaacaagcccagacacgcactctctggatataatctgcctgcaactttaggctaggtccctgcatttagaaagaagacagacagagagagagagagagagagagagagagagagagagagagagaaacacaatagaaacaaagacaaagagaacaaggatagacacacacagagaaacacaaaaagagatagaaacaaagagataggcagagagatacatggagagacagtgataaaaagagaggcaaggagagagaaagggaagagaaggtgaggaagggagtgggtgagattatctgaagcacatgaatcagaagaaagcggtgctctcctttacagaagatatgtcaaaacagcaatatctgagaggaccacagaattagccattttcactgaaaattttattgtacaagtagtacacattcatactagaaaaaaaccacttattttcaacttaggcacattaatagaaaaaccataattatacaatttcgttgggcacattgctctgtgttagcatgttagtcctgttttctacagtatctgttaaaggcacaggattggattaactggggagatgctgccgtgctgtgccgtgtttagaagcagggaccacagaaccacaaaaatcctcttctcaagtgtgtgggcccccaggctgggtcccccgtgctgagcctcagaacactgggctcctgctctctgatgctttccttcagcagctctgcttcgtcttcagttcaccccagtgtgagcgcttgcttccattcactctgtgggcgtggccatggtcatctctgcctccaaagtctaaaactggaagtgtgtgagctggaggaagtgggagagcctcacattccaaacagagcgccttcggatagaccagagcgtgacattgctcattgctgtcagtaattcttcagagccctgctttgtctcaccaaagccccagcaaaggggtcatggcatctgtttctatcatagtctggcattacctatggctttatgacacgacgaaatagttcaagaaagcagtgaagcatcgagtttgactttcttttagtgttgtctatttgctttcctgttgaaatgctgtggttttcttttcagagcacttgagcaaggtagtcaaggaagtgtggattggtttgaaccagctggatgagaaggctggctggcagtggtctgatggaacaccactcagctacctgaactggagccaaggtacccgcagcaccttatctaccttcaacatgctgggatatgctgcagacttagacattgcagtcccacaaaaatattttattctgagagaggttaatgtttacctccttgggtcaggttctcctgtgttacccaagcaagcctagacctctcagttcttctgccttgacctctcaagtgctgggattgcaggtgtatgccaccacacctaggggtttataaatactgttttattcttcctggcttcctacaaggcgagttttgtagaaggcagaagccagaaagataatctatttagctaacatcctggggctatgggaggggggggatgtcaaagatagactgccattttcaaaatagcaacaaattgcaaaatatttcctctgctttgatacaaccaaagtagttctctagtcagatctagacttgaacttcaaaatcacagacaattatagtgagtgtcctgtagggggcgctacagaggcaaagagaagggctaccttctgtgctgcaagcatttctgtgtgtattgattttcagagataactcctgggccatttgttgagcatcactgtggaaccctggaggttgtttcagctgcctggaggagcagggactgcgagtccaccttgccttatatatgcaaacgggatctaaaccacactgcgcagggaatcctgggtaagtgctcctccagtcatcctttggttgttgacatgtcccctccacgccttcaaatttctctgtttttgtaaataattcataattagggcttggaaaattcaggttggtggctatgtgaataaaaatgtgtaagtgaccccggccatcctgaagtaccatgcctaccacaaatgctcaaaaccagagcaaaaggacattagccgagtcaacattcctgtccttgctcttccatcaatccatatcagaaaaccaacgtgtgctttcttgtatagttttgagttttatttgagggattcctcaaacttaaaggtaaaagagaatatcttagcagtacatttattatgctgattttctttgtttttctttttgttcgctttttaacataatacctgtacaaaattatggagtgcgatgtgctttgctccatgtgtgttgtgcaatgatcagcatagccattgcttcaaacattatcatttctttgtgaagaaaccattccaatgcctctcttaaggctatttcaacatattacagtgcaccgtttagactctggtcacctggtatgcaacagaactccagacctctactgaagtattttcatgtttctgccacatttcaaatttcctattagtaatgtgctatccccactaaaataatgaacaaaatttgggttataattaaaacaaataattcctagttataatctactccaagcctatcatcgtcactcgttattcatctgtgagtatgagtgagtactgacagatgtgttgacagtgatcagtttatgtttttgtacaagacgtatacacttggcgtatgtgcgcgtgtgtatgggcgtgtatgcccatgtgaacatgctgaggccagaggacatcagctatcctgctctctcactttccgcctctttcccctgagactgtgtctcttactgaacctggagatagactagtagccagcaagcctcaataataatcctctctctgcagtctcctcccacactaggattttaagactcatgcctgactttttacacgggctctgggggatttgaactcacatactctggcttgcacagcatcattcttacccactgaccatcttcctagccctaattatatccatttctaatgtgtcttgcctcatttagtttctgtgggaacttttaatctgaacttaaaagtcaaaataacaacaaggccaaattttaaagaattattacagggataattagaaacagctctagattttaaaatacactaattcataatttgtaaacattgcctctgccacttgggttctaactgtttttttcccctccaatggcagttgacaccggcagtgttggagaactgggcatagcgtgggaggggggaaagcttccactcataactttgtgtaacgatttttccattatttcaagcatttgctagaactgcttctggctgttatggacatttactttctgatttgtttcttcatcctttttttttttcaaagattatttattttatgtatgtgagtacactgtagctgtagagatggttgtgagccttcatgtagttgttgggaattgaatttaggatctctgctcgctctggtcagccctgcttgctttggttgttcctgctctctctggtcgatccggcccaaagatttatttattattatacataagtacactgtagatgacttcagatgcaccggaagagggcatcagatctcattatgggtggttgtgagtcaccatgtggtttctgggatttgaactcaggaccttcagaagagcagtcagtgctcttaccctctgatccctcaccagccccggtttcttcattccttatttctccatttcttctttcatccttcacttaatttttgttctctctctctctctctttctctctctctctctctctctcgtcaccttattttcttttgtttgacttgatgatctcatcaatagatctagttaatgaattggtctgataattactctagtgggatcacactatgtttctgagctgccaggatatttttttttttttttgctaaatgacacatttaaaaaataataataaaattttaatgtgctcatgcagtagagaattgatgaatatataaagtatacgttgttcatttcaatcgggttgagtatacctatgacctcaaatgttaatcattagtgaaaacctgcatgcttgttcccagtttccgaatgctcagcccttcactgtcccctccagctcaccgtcacccagctgtggatagcgcctccccaccccgcccagcctctcacttctgtcactctacttcaccacaaaatgatgacatcaaaatccgtgaaaatgttgttacatttcacatgtgaacgagagcatgtggcctatgtctctctgtgcctggcttcctatacctaatataatgacctaggtctacccatgccatccaaatgacagaatttcactcctatgactgaataatacttcgttaaatatattgtgcatggtgtaaatatgtcacgtctttttattcacttgtttgctgagtgacacttcccttgtttctgttcttgactagtgaagtaaataatgcaatgtcactgatctagaggagataggacctgggagaatggagctgagaaatgggtggactaacgtctcaagcaaaagccactttactcaaagcatcagacagtttatactctgagggtgaagaaaggccgccccagtaaagttctcattagttaagctgtatacaatctcagtaacaagccacacatggcaaaaacaaacaaacaaaccatgtttttccatggaggcatagaaaggatagtttaaccatttaattgaatagcatcagcaagcaataatgagtcatctgcagtaaagccactcctctctgttacacctgggaggggtacgcaaaccattccaagaacaattccatgttttgaagaaactgatgtcacaagacgttgttttattttcttggagctttctcacaagcactcaaaattctcctcacaattctcagaccaagttctgacaatgctacaatgggcatagaagtacagctgttcttttgaaatactaatttcaattcatatatatatatatatatatatatatatatatatatatatatgtagaagctttttagttgacaatactcatttgtctgatattacttttaattactgtgcttcagactcttcttgttcaaaagatgctcacccatttcaatatcctgatgtacttgcccttttttcttcaaacagttccataacttaaggtctttttgtaaattatgaactcatttttatttgttattttgcaaatgctgaacatggtatattttcacttttccatgtatgcacgcccgtttctccagcactttttattgaagatacttctctttctttgttctgtggtcttataactttggttgaagatcatttgctacaatccacgggctcacttctcagttctttatcctgttctactggtcagagtctgtgtttatgctgatcccatattcctttgaatactagagttttgtagtatgttccagagttaaattttgttctcttcaccttgcatggttatcttagttggggtttcattgctgaaaagggataccatgaccaaggtaactcttataaaggaaaacatttcattggggctgtcttacagtttcagattggtccattgtcgccatggtgggaaccatggcagcatccaggcagatatggtgctagaggagcaaagagttctatatcttgatccgaaggctgccaagagactatcttctgaaggcaggcagcaggttctctcttccaaactaggtggagcttgagcactaggagacctcaaagcccgcctacacagtgacacacttcctctaacaaggccacacctcctaatagtgccacttcctacaagccaaggatattcaaacaccacattccactccctggcccccattggcttgttcaaacacagttagtccaacttcaaaagtccccatagtctattacagtctcaacaatgtttaaaagtccaaagttcaaagtcccttccaagattcatgcaatctcttaactctaatcccttataaaatcaaaatcaaaaaccagttcacaaacttccaacatcacaggatatacattaccattccaaatgtcacagtgaggaaatactgggccagaacaagacagaaaaccagctgggcaaacttgaaactgcatctccatgttgatatcaacatgctcttcagagctccaactcttttcatctttgttgatggcaacaagctctttcctcttgggctggttccactccctgttatcagctttccttggcaggtatcctgctgctcagaacttacttctccagttctgacctctgtagcaccctaggctctgattaattctactccactgctgctgctattcttggtggttatcccatggtactgtcatctccaacacactggggtcttccattgcaacttggcttcatccaacagtctcttataggctcttttcatggtgctaagcctcaatatctttggatgaccccttgaatactaggctgtcagctacaactgaggctgcaccttcaccaatagccttctcggtctctcacagtgccgagcctcagttactctccataactccgtcatgccttcaaaactgtaccatctgggtgattcttacacattgctaagtccagatgccagagcaatgtctgtatccggaacacagctcctttgtgccctcagaaaacaccagaagatttcaccccagtgatgcttaaaactgtatctccatctctgatgacaaagtgctcttcagatctcccactcttttcatctttgttgatggctacaaacttcttcctcttgggctgcttccactcagttagaagctttctttggcaggtatcccgcagctgatcttttcttaactacctctaatttcctagctccagctcaccagcatcaattgtttgcagtaaccccttctactcttgactctaaagtcagtgccacacggccaacgttgccaagttctgctgctcaccagactgaaacatggctcccttgttctattacatctttaccaactttttgttttcagtggtttccttcactgcttaagcttggatgtcctggaacttgctctatagactgaccttgaactcaaagatcttcatatctctgtctcctgagtgctgggattaaaggcgtgtaccaccatgcctggacctaagcctttctttacccctcacaagatctttacaagttctgtattgtagttcattccagatacaattaagttgacaactgatagtaaccatcacaatccatcccttgtcaatttgacacataatcatatctccttatgtccaaatgaaaacaataaccaggtaataataacacctagcataatataagtatcccttattcaattgcaaacaataagcttaggtgggtaggatcttgtaccgaggtctccactcttttaattccattcaatatccttgaacacagaatttagctccattccacttcctcatgtccctttactctttgaaccatacattctgtatttttcctttctaagcttgttactcctgatcagcttgttatctttaatcaaaaacactcttcacaagagtgaaccatagtacagaatctatgctaggcttttctgagatttcctttgtcaatgcagttaatctaaatctctttattttcgcttcagcagactcattcttcatcacatatcacaagaatgatctctaggtaacatactaaaattcttctcttgtgaaacctcttgagctaagtccccaaagttcaaatcaccctcagcaccactgaattccattttcctattaggatgacctgttaagccctgcttaaaacattctgctgctttccaaagtccccaaatccacattcttccaacaaaagcatggtcaggcctatcacagcaataccagtcctaggtaccaacttctgtcttagttaggttttcattgatgcaaaaggacaacatgaccaaggcaacacttataagggaaaacatttcattggggctagcttatagtttagagcttcagtatagtccattatcatcatggtgggaagcattcaagcagacatgtgctggaggagcaaagagttctatatcttgatctgaaggctgccaggaggagttgtcttccaaaggcggccagcagaagggtctctcttctgtactgggcagagtgtgagcactgggagaacccacagcctgcctacaccatgacacacctcctccaacaaggccacatctgttccaataaggccatacctcctaataatgccactttccatgggccaagcatttaaaccaccacagcagtttttactgtttaagtgatttatgattccagacaaaattaaggcttgccttttttagttctgtgaaaaacatccttagtattttgttaagaattgcacttatcctatttttccaattattgtaaacaggttttatttctttattagataattcaccgttagcatatagcaatagtcttgactgttgttgttgttgtgtttttcatgacagggtttgtctgtgtaacagccctggctgtcctggaccttactttatcctcactttgtaaaccagtctgggtttgaacttacagagactagagtgctgggattaaaggtttgagctaccacgccagaccaaataatccttacttttgatgtgttatatagaattcagttatatttctatctgttttctgtggggttggtggtgtctctgcatatataataagatgatgggttctacatacaatgacaattttgagccctcttttctgatttgaatgcttttccttcttttgcttgattgctttagtgagcacttcaggaactactagacagaagtagtgaaagtgggcacccttgtaacagaactcaaggagaaagctttcagcttttctcggttcagtttatactatgaagcatttttttaaagcaataaagtatttctgggttcattcctaagtaccacaaataccagaaggtagaagcaggaggatcagagcttcaggtcatccttggcagaagctccaagccagcctagactacatgaggccctatatttaacacctccaccaataataacatttcataatacttccgaatagggtagagggaggaaacatagagggggtataaaaaaatattgcccaaaatagaaaaactttcaagaacaagatttgatgaatctatgaagggaaattaaaaatgaaagcataaaagtataggggaagttcggaagggacagtactaaaatcctagagggaaaaagaggagcaacagggccacttctttctggctccccagaaactggccactgccagctacaaacatggaggagttcatggctgaacctgaagactctttcctgtcctgttggttttgttgttgctaaagctggaatggacaagtgttaatgtctgcccagttgtcttcatagtgggggttttccttctctgcaataccagtggcctctgctggccatgcttacctttgcattctatgacttggatcaatgtcctcaccttccccagattcctagtggtatcccctggggtgactaatcttttccctgatggttgtcccccaaatgcagtggagtgtgtgggaagatatcatagcattaggatgagtgcaggcaggaaacccatccttgcatattactttttgagtaatgtcttagttccttttccaccctgtgacaaaatgccatgaccaaggcaatttatataatagagcatttaattaggcttgcagtcactgggttagagcctatgataacaatgcaaagatatggtggcagggacagctgagagttcttgacctagataaataggaagcagagagggcaccctaagaataataggaggttttgaaacttcagagcctacccccaatgaaacacgtcctccaacaaagccacgcctcctcattcttcccaaacagttccaccaactggggaccaagcataaattctcattcaaaccaccacagtgttagtgagcctgctggagggacagtgtggtgggtatcacatacacaccttctggacttcagaattctcactctctaccccagtgacttacagatggtggcttcagagctctgagctgtcaaactgcagcttttacagagatagcctttagtttaccgtgttaccccaaagtgccaacatcttcctttccatctctggttttatctgaactttttctttttcagtcgggctaaggatttgtctattgtatttggagaattccagtagctaatttcagtgaccttttgtaatttgtcacctccatatcattcattcctactctggtctttattattctttccttgatttgttcttgttttgctcaccaaccccttgaggtgcagcaagggaatgggtatgacgctgaatgtctaccttccataggtaagcagaggattcctatacgcctccccactaatgctgagtttgcttgagcccatatagcttggcatgttgactctctacatgcacctgtttcaaaagaaatttttaaatttcttcttcttcttctttgatttattgcctgttcaaaaacaagtcatttaatttccatgagtaagtattagcttcctctttctcatttttgaattctagttttattgcattgtgttggggaaaaaaaagtagttgatgtgatttcagtttttgtcgatttgtcaatgcttgtcttgtgaccaggaacattatctgtcatggagaataatttatgctgatgagggaaattgtgaattaggcagctgctggaatgttctgtagatgtctctaggggcatttggccagggttgcaatttgattttgcagttgtgtggttggcttatagtgtggacagtctgtatatcactaaatatgaggtgcaaattgccaactactagtgtattagagtctctctcttcccttaagtctgctaatttataccttatgtattttttaaaaatctaatatgcttctatcaagcagctgttttaatttttatggaaggtctcccagactgattactagctagtccatttctaaaactttcttttgtctaacagacacaggcatggcttcctgaaaacttccaatacttattgtaatgcagcagtgtctagccactaaaggactgtttatcttgcctttcctaatctagttttgttcatgccaatccttctagaaatactattctggatgcctgttttctctgggccatttgtcaccagataatgctcacgtccaattggctaagagcttggcattggtaccttgtcactcttattaggcagtaatccaagtcagcttttacccagtgtagttagtacgttgttcaaaaggaactaagagagtatctagagagaggagtctgcccccatgagccagctacacccaaatgcatcactcactgtcagacactgaagggttctgcccagttctacacagtcaccaagaatcgacctaagtcatagccatggccaccaggctgtgctgcaataggaagctctatgctagccttccctctgctctctagcagatggcatcctgacctctgccttgcctcctgaaggccagttttgctacagccagcttcctggacaaatgcaagactcagcctacagttaatagctttatggtgggagttgcagggctctgcttagcactgggtttcaccaggggagccctggtgctgggtctcaaactacacttaatttggtcttcccctggtaagaggagtctctgtgctgtggggcttggaggtggggaaaggatcaaaggctttccttcctgctgtcctcactgccttcccatttgctcatactaaaaggggccgctatagcatcctacctgctattcttagctcttctgaagaaagtctggtgaaactcaagggaggagttttgtacactcatcctgcatgacatcatagataccacagcgacccaggagaatgagaaaatgaaacttcatcctctgtgctctaaaggaagtgaacagaattttaggctcttttagctccaggataaggatacctgccctgtataaaatccttggaataccatttaaattatgtttcataacagcctttttataatatgaaatcatttttaaataggcagaccagttacagtctctctctccccctccccctcttctctccccctttctctccctccctcttctctcccctccctccctctctctctctgtttgtatatatgtgtatgtttctatgtatatatttatatatgtatgtgtactgtgtgtgcccagtgcttatgttaaaaaaaaggggctccagatcctctgagctagagtgacaggtggttgtaagccactgtgtgggtgctaggaaccaattctgtgttttacttgctaaaagtgatcacactcatgactctataaaggatattgggtagcactggcagtaattgtgcaaatgctgttctttgtgttgatttataaagaaaaggactcctggaaataccatgccactcactgtgatcctgactggactcccttcaatcgtaaatgctacaaacttaagaaagacagaaagagctggcttggggctctgcactcttgccaatcgaatgacagcgtgttgatggatgtagcttcgttggcagaggtggagtttcttgtaagcctccttagggatggtgagtactaaagactttgcctcaaggtctatgaaatagtataagtaactaccttttaattagagttgaaaacaagttaaattattttaaagtgataatttatggtgtatatatatgatatatacactaatatatatggaatatatatttaaacataaagtcaaaatttctgaaaaatacacagaaacacaattcactggattttttaagtcatatattcagaagctatgtaacatatttacatttgtcaaatagatatgtggtttttttttttttttggcccaacctatacaacccaacccatacacctaaggcttcggaaaaattatggaagaaggaacagaaagattctgagagccagaaaaccaggatgtctgctgtgagatgctgcttatagatatgatagggaagtggcacacatgaaatcttaacaatatagctgactaaacaagatctgtgtaatgacaacaccagttgatgacaacatagataggggaagtctcacagagtcctagatgaagagctatagccaatcaatggctacagagagatgaaggatcagttttcttcagggatgagaggtgattcagtcccaaatggtcagccctaaacacatgtacatacaagcaacactaaatgtactcagtagattatacacatatacatatacatcatatacatatatataatgaatttgagagtgggtacagtggaacactgaatcgatggagagagaagtgggtagaaacaatgtaaacataatactcacattaaattctcaaaattaaaaaaaaatacatgaaaaagaatctcaaggggtagaagtcataaagccattccttagaacttctatctgaaccctaaacccataagtcagcctatggctgctgggcagccatgtgctatactctcctaaaggtaatgtcttaggtaaataatttgacttcatttgcctcagtggttttcgggctgtgtgtcatacccgaggttccaggctcctgagccttccctcttcctttcttcagagcaagctgccccacccccacccctacccatgttatacattaagcatggtgtcgttcccaaaaaaaaaaattccttgaaattataccttcattttccaatgtttaacaaaaaaatccctacgctctggctggtgaccttttcaatgttagactttagttcgcacacacaaatacttctaggtcattttccctaatcctttgcatttgggattaaaagaatcctgcagtgtcccctgtatcaacaaggacacttgaagcctctctgctgcctactgcttctcactgcatccatggggctctgaggttttgtttgtgtctctggcaaccccactgttctgtgtaagctgtggggagcttctgcttgttttattgagaggggctgagggggagggagagaagaaaaaacacacaagttacaccatgttaaaagagtttgggtggtggtggtggtggtggtggtggtggtggtggtggtggtggtggtggtgatagtggtgatagtggtgatagtggtgatggtggtagtgattttaatgttcccctttccaaaatccaattagcctcttaactttccttttctctacgcaaaagcaaaactagatatttcaggtcacttttcgcacaggaggagcccacattctggagtccctgaactctgacttgctccggccagtgcttgcttttggtttagctcacattccaccttccttagaagacctatattgagcaaacctggatattaggggaggggagaggactggacaagtactccgtagtgagtcccaaataagatttatcacataaacaaaaagaatcacatgtgagtgagtatagcttactaataacctgcatgtgccataaaaataagcaaacaatatcttataatctctatgtatttcttacagaaaatgcatcagaaacgtggattggtttgagtagcaataaaatcccagtctcctttgagtggtccagtggctcctctgtcatctttactaactggtaccctctggagcctcgaattcttccaaacagaagacaactgtgtgtctcagccgaggaatctgtaagttgattcatttgatcagtggtcagttttgtggcactgataccgagactcacctatactagggacttgggtcgtggtcgagaccaagagaggcagttcctacacttcacagggctcccatgcttgttactatgcacatggtaactctgaggaaagaaagacaaagctggcatcagagcgggagctgcagacaggaaaggggtgggaaacctctctgaacatctggtgtttaagttaggacttcaaagaagcaaaaacccttacacaacagaggaaaatcattctaagaaaaacacaaaggtaggcaaagccctagagagatcgttgctgcttcctcccctaaaaccaggcaggtacacattgttctgaaggttagtgaagatctgtcgtcttcaatagccaaacacggggccattagtaaggcggtgataggacatgggacaagaggaataataaaatatagacttatataccaaggccatcagagtgtttcaaggatccagtggaaaaacctgacttgaaaataactttggtcataatgtacagaatgtattggacaaaacagaagctgagaaactatttgaaggctattccatggttgacctagtgtagttactatgctgagaagaaaaaagattcaaggtgtctcaaataacaagattcattgctaactaaattggctgtggagggccagaaacaaattttgtttggttggtttttacttgaatgaacaccactttggtagacagtggtgaggtagaccatcctgctggagagatagggaggaggaaggctggaaggttacactggaaagtgatggttttaaagctcccgtagcttataaacacctctttgaagaccatggatcaatgccaaatctcactctcacatgaccagaatggagctagcgaccttggcattatgcacactcttgtctgccctttatccaagatgtcagatttgcagaaatagctttagtctgaaccatctgaatagtttattaaacattttgaaaaaatagcctctctttgctcaaacagctgtggggagcactggctgagtttaaggagactccaggacttgatgggtgtcctcattctttctagccacaggatgtggtgtcaagttcccccccaagaaacagctcattaaatgctacttaggtagcttgacaaaataattgtagcaaccaaacatgaaaatttcaaagcgcttacttttctgacaagtttcacttctgtatcttttgagacttgcagaaacatgtgcactcataattatacatgccaccagtgtgggtctgagtggcatttgggaaggaagcagcagcaacttctttagatgtctgtcatggatgcagctctcctgaaccctagcacattttcaggagttgatggtgtttgagtcaggggttcttagataattaaggtgacctcatttcctattgtctggtgtgactatttcacttaccatatttatagagggaaagctaacatttggatagggattgttttaattagtgtatattcgctgtacacattaatgggttcatcatgactttttgttcaagcatgtcacgtgctttaaccatgtcagacctcattaccctgtcatctccttcttcctgacactagtcctctctctttcctccaggagtcctcatcttgtgagtgtgtgagagtgtgagtgcatgtgagcatgtgtgtgaatgtgagagtgtgagtgtgatatatgtatgtacgagtgtgagtacatgtgtgtgtgagagtatgagtgtatgagtgtgtgagaattgagggtgtgtgagtgtgtgaatgcgtatgggaatgtaagtgtgtgaatgtgtgtgagtgtatgtgaatgtgtgaatgtgtttgagtgtatgtgaatgtgtgtgtgagtgtatatgtgagtgagtgagtgtgtgtgtatgtgtgtgtgtgtgtgtgtgtgtgtgtgtgtaaagcctagattccacataagagagaaacatgggatagttgtctttatggtctttatgtctggcttattttaattgtgctctctaattcctaaatagggattaattttaagaaaatgaggacaaatgttgatatttgtgctgcctattttttgttttgtttcggggttttttggtcaacttgacacaagctggagttgtctgagatgagggaacttcaattgagaaaatgcctccgtaagatcaggctgttgggcattttcttaattagtgattgatggagaaggaccattatgggatgtgccatccctgggctggtgaccctgggttctataagaaagcaggctgcgcaagtatggggaacaagccagtaagcagcaaccccatggcctctgcgtcagctcctgcctccaggttcctgcctgttgagttcctgtcctgacttccttgaggatgaacagtgatacagaagtgtaagctgaataagccgttccctcctcaaactgcttttgctcatagtgtttcatcacagcactagtaaccctaactaggcagtattgctgcatggtcagaacaatcgtgctctgagagattttgcagcacctcctcttttttgcagcatataaactccttaaacagtaagcagatggagcattgaaattaacatttacttccatcaaacagttctcagtatgaatataataattattattatatgaataattacaatcactaactttacataaatctatctcacacctaaatttgaaggtgagagctcattcacacttcctcccaacagataccaagcacctgtagggtgtctgacactgtcctatagcagaaaatcattttctggcaggttccatggagaggcctggcacttctcttactggtgatgatgttggtcctgacatagtatttccctgaaggcagtcaaaggaccccatatatccccctaaaatcctgaacaccaaagcaccgcctgaaatttgaactgagtagttttcacctaataatctgttttgtgttaggatttccaggtcgtctgggaagacactattttgatctgttcactactatattattatcagtaaaggatctgagaaaagctttagactagtggttctcaaccttcccagtgctgtgaccctttaatacagttcctcatgccgaggtgactcccaaccataaaattatttttgttgctacttcataactgtcatttggctactgatataaaatataatgtaaatatatgatgtataggacatcttatacatgaccccacaaagggctcatgatataggttgagaagcactgatttaggcagacataagaaaagacctaaagggtctgtatatgaagaggaagctggggctggggagaggcctccctgagtatacagtactttctcagcaagcgtgagcacctgagttcgaattcctagcatacttgtaaaggcataggcatggtgtcgggtctgtaaccccagcagtggggaggaaggagataggcagttccctagagctcactggcaagccagcctagccaaatgatcagctcaggttcaatgagaggccatggctcaaaaaatgagaaaagcaattgagaatgccatgcaatgtcaacttctggtttacatgcgtgcatacacacccaacccccaacatatacannnnnnnnnnnnnnnnnnnnnnnnnnnnnnnnnnnnnnnnnnnnnnnnnnnnnnnnnnnnnnnnnnnnnnnnnnnnnnnnnnnnnnnnnnnnnnnnnnnnnnnnnnnnnnnnnnnnnnnnnnnnnnnnnnnnnnnnnnnnnnnnnnnnnnnnnnnnnnnnnnnnnnnnnnnnnnnnnnnnnnnnnnnnnnaaggaagggaaggagggagggaaggagggagggaagaagggagggagggagggagggacaggaaaggagagaagaacgctgggcccggggaatatctgtaatcctagccctagcacttaggaagccaaggcaggaagactgctgagctggagcaaatctaggctgtgttctgagttctagcctgagcctgaaactgcaaagttaagatctactctcaaaaaaataacaatatttgattaattaaagaggaagcttagtgaggaaggacgttggagttgaacatgaattttaaccctggggacgagtcatggcagtttctgcgtattcccagcaccaaccaaatcccttcctcactcgggaccacccagctctggacctcactggggtccacccaggtctggaccccgagcagactgcctcaggcaagaagcagctaccaggctgttgtgtgaccatgcagggttctggaacaccacccactgggaacacttgctattcagagctctgctcatgactgagcaacgtcctgtccggagttcactcattcatcctgtgacacttttccctttaggacggacgctggaaagtgaaagattgtaaagaaagactcttttatatttgtaagaaagcagggcaagtccctgctgatgagcagtccggatgtccagcggtgagtactgcgagcactgccatgttttattttgtatcagtttagggctatggcttcctaatgttttgttttgttttgttttgttttgttttgttttgttttgttttgttttgttttagctcattgtttcagtaaaacttgctaagtaattggcacatgtataattaatttatggaatgagtccagaagccaggcatgtactacaaccctaatactcaagaagctgttgaagatcataaatttgagaccagcctgaactctatagcaagttccaggccagccttgctacataataagaccctatctaaaaaacaaaacagcaacaatttaaaaacaaaaacattgattacctcaaaagcaaaacagtaatttttatttcccgctgagtaattttggggtgttgggctgtgtgagcaatgcttccatcttattagccaaaaaattactattaaataagaaatattttgtcagaaaagtcaaatataagtcactcttcctcctgtccttccaaggacagcccaggggcacctgaggggctgagtctggccccagaacagacaggaggaaaacggaccagtgagttggcttggttactgcggtgttgttttagctgaattagccaatttctaaagtgttctgcaattaaccacagaactaagaccttttccaagaaatatcctagaaatcatcttgtgtctgatcaaaagctggtggtgttcactgacagggcacaaaatgatgagcattttaaactggtgaggaagcaaacacggacagacagagtcatgtgacctggtggtgtaggaagcagaagtgaagtcaggtgtgctagaataaatgaatagccacttcacgatatgattttaaggaagagacctgccctaccttgctcctactgctaactgacagagctacacattttcatcttcatctaagtccccaaacttacattcttactactccaaaggacaatcacttaatttggggggaaaaaccttagccatatatatatgtgtgtgtgtgtgtgtgtgtgtgtgtgtgtgtgtgtatgtgtgtgtgtgtgtgtgtgtgtgtgtgtgtatgtgtgtgtgtgtgtgtgtgtgtgtgtgtgtgtgtgtgcgtgtgtgtgtctgtattagggagttagtttctacttggaaacattatgagccaaacaagactgtcctgggggctggggatgtagctcagttgcaaaggacttgccaagtgtgcaaagacccctgggttccatgcacagcatggaaaaaaaaaagacaaaaaacagttgctttacctggactcaatggctcttgtagtcccaactcgcaggatgttgtggcagaagtttgagtatagcctaggcaacttaggaggtgacagtttagacaggtgtgggctaccatgactcaaaacggcagcagtggcagcagcaacgaaaaagtgcctcagattacagaagaactaggtaaacttcagtatagacccagatgaccaacctgttagcaactctacttaagcccctaggaacccaaaacagctattgtgaaatcaaactgaaaactccatccatcacactccgcactacctacaggccgggcctcactgctcctccgcgttttcccccactcaaggattcccctgccttttctcctttgctccttgggacagccatggacgttattcttaccctcagcccacagatgaggaaactagatgcggagagattatgtctcttaaagcacatccattatttataaataaagtggcttagtggggaacccagaattcaaaccaattcaaaccatcctccctccatggtcaatactatattttaacccaaacatcacatccatttgaaagaaattctgtgagcctaagaaaaagaatggtggctcttgcgtgagtatctccttattgctttgtttgtttgtttttgcagggtttccccattgttttcagttgtgtttgtttttaagatggttatatttttttgaaatgtaaactgagtatttaattaaatgtggaccgggctgtgactggtggcatttccagagggaacaaacatagagctctatggaaataaaactccaagtcagaaaagaaggtggagcaagtgggaaggaggggctctccgggcatttaactaaatcacattgtgtcctttctttctgggtcttgtttttcaccccctaagggctgggagagacacagcagattttgttacaaaatcgacacagtcctgcgaagctttgaggaggcttcgagtggctattactgctctcctgcgctcctgaccatcaccagccggtaagtgcgaactctctaagcggcctcagctctggcctgggctgtgcgatggcagaacatcggtccactgggctcgcccacgtctaaaacgtgtgtgcagtagaatattaactgattttgagtatttatggagaagagtcgaaatctggtgttatttctaacttgatttttttttttttttaatgataaacactaaagcttaaggtagcctttactttctaagaacgttcgttggtttctagcttggttgacatagacaggtatatttgggtttgtcttctgtttgtaatgagaagaaaatgtcactgaacagtacttttaagtgtgatggttagaagttgtggtttgtttcatagaagaggaaatagaaggaaatcgaaggggcaggcaaatgtgtcttaggggttttatttaaacttagattgctctgtatatggctgtcttcctgataccaacggagagactctgcctgtttttcgtatttacaatttgaagcatgttacaaatgtgtaaagggaataaaaaaatgtcataagaaagatgtgtcatggcaatgcccaggacactgagggctgagggactaactcttctattcctaacacgggtagaattcttcaggagttctatgggaaactgtatcagccaagcaggccacttctgtgaattcaaggccaacctggtctactcagtgaattccaagctagccagggctccattagagagactgtctcacacacacatgggcaccctgctctccctactttggaagtccacattgacagccgttatcatggcctttcccctcccaccctcttctgtcgtccacacagtgcttgggaatgagcctaacacccagaagaatggaaaggcaggcggtgttagtgggctgagtggctctcatggggcacagcaaaagcttgctagatctcggtgctatgtctaggtctcccttcctccctcccagacacagcttccaggcagaaggagcccctgtgtcctcagctcctcaaagctccaagagcacttggggtcacaagtctcccagttagagacccaaaattggacattataggagcctgcccaatgagactagcttcttttattaattatgatttcattgaagtctaattgtttcttctttttaatatctcagttttcttcaatattcgttgagtgtctatcactgtaactcaaatttctttccctggggagatagaaacaagggctacccctcctcctaaggtcccaatcacaaattgaggcactattctgctaaagttcactctgggaagccattgagtttatttggctttctttcaagcataaattatttactggaacatggaatattccttccccgaccggccacacctggaaatcctttgtccagcagggaagagggctcccaggtagctacttcgttggagaatcctccccccttagtctttccagacctaaattatcaggcagtacagaacagctaatactcagatgaaggtcttgtgacccgcctcacccatctatctgtggaggtaaagaaacccagctaggaaaacccctcggcacatgctggctggtgagacagccgtgcaaagcagtcactttctcatgcaatgttaattactttacacaggttatctatctggcctgtgtgtgtgcacgagtgagtgtgtgtgtgtgtgtgtgtgtgtgcatatgtgtgtgtgtgtgcatatgtgtgtgtgtgtgcatatatgtgtgtgtcctcatatatattcaagagtttatttgaaaattactcattgactaacaattttgtaaaagattccatactaaacactacatgctatttgaagaaatgcaggtggtatgactgagccttctacagcatggaactgaagagaccaaacattgcagacatgaaacaggtcaaggaggtggagtagcagccttgcagattgctaagagtgccatagagcccaatccaacacagaaatctgttagagttcacattcctcatagtctacctcattctactgttagagagtttcgattcctccaagctggataccagcggattctgtaaacatttgtggggtgttttgtttgtctgttgttgttgttgatgttgcttgctttgcatactatatttagcagccaacccttaggaacactctgactctaaagcagggtatcacacaatttaatttttatgttaatttcagccgtgtcttattttgggctaatattgctatgataaaacaccagtaccaaaagcaacctgggaggaaagcatttatttggcttacagatcctgaatcacagctcactgagggatgccaaggtaggaactccaactgagtgggaacctggaggcaggaggtgatgcagaggcctgaggagggttgtgtgccagcttattcctcatggcttgctcagcctgctttctaccagcacccaggaccaccagaccagggatagcacacccacgagggttgggccctcccccattgatcataagttaagaagatgttctatagacttttccacccatagcccatcttctgaaggcatttctcaattgaggttctctcttctgagatgactctagcctacatcaagttgccataaaacttagccagcgcaaggcgtgtaggcccatccaggttaccttgtactggcatgtgttggcatgcctccagtctccacagagcctgcaggactgtatgaggccaacgatgtgacctctctcgcactcagtcagtcagcatcaggactcacctccacaaacaaggacacatccaaagcagaggctccgccatgatactcttgggtcgagaaaagtgggccctcatttcattcagaccccatgagggaagaaggcaagtggttatcagtgctggaacattctgcagcgggacttgtctgagaaacatgggcagtgtgagggaaggctcctcaaacccaggagctcccacagacgggcttgggaatcacgtacctccatcgccaacatcctgtttgactctccaccactctgagcacctaagcttgtagttgttaattggttttccactgtctgcacagtggagtgacaggtttgatgggtgtaattagagcacctgctgcaaatgacttttgttctgtgtttttgctcagggttaggactttttaaaaattcattgtggaatacaaagggggaaaaaaagacccttccatctgaataacagattttgatttactcgactactgttaaaaaacaaacacaaaaacaaaaaacaaacaaaaaaaactctttttaggtccggtcactttgcttccagacagaacaggatacaaaactgaattaccatgataccacatgcttaatagctaagtcgataaagcatgaaccagtcagccttgaaaagttttgtgcaaatgatgcttgattttttttgccaccccaaaaagagatatactgccatagttcacattctcctgttttgaaagccatattcccctaaacaaaattagaattagcctggtaaaatattcgtgaagtaaaatgtacccctgtcctgacattaagagagcatcagtggccttaaatgcattcacgttgctgagcatccaccagtaccatctgtctccggaccatggttcttcttctgacaggcaaaaccccatactctttcaggaatccttcctgattctccatccctcacccaccctcagctcccagtgaacagttttctgttttcagtctctagaagagggaccatccaaggtatcagatataaatagggccatcttatatctgtgttgctacatgtggtggtttgaataggtgtggcccttagagattcatgtgtttgaatatttggctatagggggtggtactattaggatgtttgaccttgttggaagaggtgtggccttcttagaggaagtgtgtcattgtggaggtgagagtttgaggtcttaaatgctcaagttacatccagtctgaaacacatctagtctccttctgctgcctttggatcaagatgtaaaacttttggcttctccaccatcatgtctgcctgaccactgccgtgcatcctaccatgatgttaatggactgaacctctgaaactgtaagccagctccaatgaaatgttctcctttataacagttgccttggttatggtgtctcttcacagcaatgaaaccttaagtaagacctgtacctggctcatttcacttagcacagtgtcttcaagttttatacacattgcaacatatgtcagaannnnnnnnnnnnnnnnnnnntgtcagaatttccttcctttataaggctaatattccattgtttgtatgcacagtatgttttccaacttactcatcaatagacatttgaattgtgtcttagttagggtctccattgctatgaagaggcaccaacaccaaggcaactcttataaaagacaacatttaattggggctggctttcaatttcagaggttcagtccattatcatcatggaggaaagcatggcagcgtccagaaagacatggtgctggaggagctgagagttctacatttttttaaatttttttaattaggtattttcttcatttacattttgctatcctaaaagtcccccagaccctccccacactcccctacccacccactcccacgtcttggccctggcattcccctgtactgaggcatataaagtttgcaagaccaaggggcctcttttcccaatgatggctgactaggccatcttctgatacatattcagctagagctccaggggatactggttagttcatattgttgttccacctatagggttgcagatcctttcagctccttgggtactttctctagctcctccattggggctctgtgttccatccaatagctgactgtgagtatccacttttgtgtttgctagggcactgcatagcctcacaggagacagctataatagggtcctttcagcaaaatcttgctagcgtatgcaatcagcatttggaggctgattatgggatgaatccccgggtatggcagtctctacatggtccatcctttcatctcagctccaaactttgtctctgtaactccttccatgggggtttcattcccaattctaagaaggggcaaagtgtccacactttggtcttcattattcttgagtttcatgtgttttggaaattgtatcttacatattgggtattctaagtttcggggctaatatccacttatcagtgagtacatatcatgtgagttcttttgcgattgggttacctcactcacaggtccatccatttgcctaggaatttcataaaatcattctttttaatagctgagtagtactccattgtgtaaatgtaccacattttctgtatccattcctctgttgagggacatctgggttctttccagcttctggctattataaataaggctgctatgaacatagtggagtatgtgtccttcttaccagttgaaacatcttttgtatatatgcccaggagaggtattgcgggatcctctggtagtactatgtccaattttctgagacaccgccagactgatttccagggtggttgtacaagcttgcaatcccaccaacgatggagaagtgttcctctttctccacatcctcaccagcatctgctgtcacttgaatttttgatcttagccattctgactggtgtgaggtgcaatcacagggtttctttgatttgcatttccctgatgattaaggatgctgaacattttttcaggtgcttctcagccatttggaattcctcaggtgagaattctttgtttagctctgagccccattttttaaatggggttatttgattttctggagtccaccttcttgatttctttatatatattagatattagtcccctatctgatttagaattggtaaagatcctttcccaatctattggtgggctttttgtcttattgacagtgtcttttgccttacagaagctttgtaattttatgaggtcccatttgtcgattctcaatcttacagcacaagccattgctgttctattcaggaatttttcctctgtgcccatatttttgaggcttttccccactttctcctctatacgtttcactgtctctggttttatgtggagctccttgatccacttagatttgaccttagtgcaaggagataggaatggatcaattcgaattcttctacatgataaccaccagttgtgccagcaccatttgttgaaaatgctgtcttttttccactggatggttttagctcccttgtcaaagaacaagtgaccataggtgtggtgggttcatttctgggtcttcaattctattccattggtctacttgtctgtcaatataccagtaccatgcagtttttatcacaattgctctgtagtacagctttaggtcaggcatggtgattccaccggaggttcttgtatcattgagaagagtttttgctatcctaggttttttgttattccagatgaattttcagattgtcctttctaattcgttgaagaattgagttggaattttgtggggattgcattgaatctgtagattgcttttggcaagatagccatttttactatattgatcctgccaatccatgagcatgggagatctttccatcttctgagatcttctttaatttctttcttcagagacttgaagttcttatcatacagatctttcactgccttagttagagtcacgccaaggtattttatattatttgtgactattgtgaagcatgttgtttccctaatttctttctcagcctgtttatcctttgtgtagagaaaagccattgatttgtttgagttaattttatatccagctacttcactgaagctgtttatcaggtttaggtgttctctggtggaatttttagggtcacatatatacttatcatatcatctgcaaaaaagtgatattttgacttcttcttttccaatttgtatcccctggatctccttttgttgttgaatttctctggctaggacttcaagtactatgttgactaggtagggagaaagtgggcagccttgtctagtcccagattttagtggaatcatttcaagtttctctccgtttatttgatgttggctactgttttgctgtagattgcttttatcatgtttaggtatgagcctcgaattcctgatctttccaaaacttttatcatgaatgggtgttggattttgtcaaatgctttctccgcatctaaggagatgatcatgtggtttttgtctttgagtttgtttatatagtggattacgttgatggatttccatatattaaaccatccccgcatccctggaataaaacctacttggtcaggatggatgattgttttaatgtggtcttggattcgaatagcgagaattttattgaatatttttgcattgatattcataagggaaattggtctgaagttctctatctttgttggatctttctgtggtttaggtatcagagtaattgtggcttcatagaatgagttgggtagagttccttctacttctatttagtggagtagtttgtgcagaactggaattaggtcttctttgaaggtctgatagaactctacactaaacccatctggtcctggacttttttttggttgggagaccattaatgactgcttctatttctttaggggatatgggactgtttagattgttaacttgatcctggtttaactttggtacctggtatctgtctagaaatgtgtccatttcatccaggttttccagttttgttgagtatagccttttgtagaaagatctgatggtgttttggatttcttcagggtttgttgttatgtctccattttcatttctgattttgttaattaggatgctgtccctgtgccctctagtgagtctggctgagggtttatttatcttgttgattttctcaaagaaccagctcctcgtttggttgattctgtgaatagttcttcttgtttccacttggttgatttcacccctgagtttgattatttcctgttgtctactcctcttgggtgaatttgcttactgtgtgctctctctagtttctttttggaggtactcagagctatgagttttcctcttagaaatgctttcaatgtctcccgtaagtttgggtattttgtggcttcattttcattaaactctaaaaagtctttaatttctttctttattccttccttgatcaaggtatcattgagtagagtgttgttcattttccacatgaatgttggctttctattatttatgttgttattgaagatcagccttagtccatggtgatctgataggaagcatgggacaatttcaatatttttgtatctcttgaggcctgttttgtgaccaattatatggtcaattttggagaaggtcccttgaggtgctgagaagaaggtatatccttttgttttaggataaaatgttctgtagatatctgttaaatccatttgtttcataacttctgttagtttcactgtgtccctgtttagtttctgtttccatgatctgtccattgatgaaagtggtgtgttaaattctcccactattgtgtgaggtgtgatgtgtgctttgagctttactaaagtttctttaatgaatgtggctgcccttgcatttggagcatagatattcagaatcgagagttcctcttgggagattttagctttgatgtgtatgaagtgtccctcattgtcttttttgataactttggtttgtaagttgaattcattcgatattagaatggctactccagcttgtttcttcagaccatttgcttggaaaattgttttccagcctttaattctgaggtagtgtctgtctttttccctgagatgggtttcctgtaagcagcaaaatgttgggtcctgtttgtgtagccagtctgttagtctgtctttttattggggaattgagtcggttgatattaagagatattaaggaaaagtaattgttgcttcctattatttttgttgttagagttggcattctgtccttgtggctgtcttcttttaggtttgctgaaggattactttcttgctttttctagggcgtagtttctgtccttgtattggtttttttctggtgttatcctttgaagggctggatttgtggaaagatattgtgtgaatttggttttgtcatggaatactttggtttctccatctatggtaattgagagtttggctaggtatagtcgcctgggctggcatttgtgttctcttagtgtctgtataacatctgtccaggatcttctggctttcatcgtctctggtgagaagactgtaattatagaagtctgtaattctaataggcctacctttatatgttacttgacctttctcccctactgcttttaatattctatctttatttagtgcatttgttgttctgattattatgtgtcgggaggaatttcttttttggtccagtctatttggagttctgtatgcttcttgtatgttcatgggcatctctttctttagatttgggaagttttcttctataattttgttgaagatatttgctggtcctttgagttgaaaatcttcattctcatctactcctattatccgtaggtttggtcttctcattgtgtcctggatttcctggatgttttgacttaggatctttttgcattttgcattttctttgattgttgtgcccatgttctctatggaatcttctgcacctgagattctctcttccatctcttgtattctgttgctgatgcttgcatctatggttccagatttctttcctaaggtttctatctccagcgttgcctcactttgggttttctttattgtgtctgcttccctttctaggtcttgtatggttttgatcaattccatcaccttgtgtgttttcctgtttttctttaaggacttctaccttttggttgtgttttcctgtttttctttaaggacttgtacctctttagcagtgttctcctgcgtttctttaagtgagttattaaagtccttcttaatgtcctctactaccatcatcatgagctatgcttttaaatccgggtctagctctttgggtgtgttggggtatccaggactggctgaggtggaagtgctgggttctgatgatgatgagtggtcttggtttctgttaataagattcttatgtttcacctttagccatctggtaatctctggagttagttgttatagttgtctctggctagatattgttcctcccctgattctgttagcctctatcagcagacctgggagactagctctctcctgagtttcagtggtcagagtactctctgcaggcaagctctcctcttgcggggaaggtgcacagatatctggcgttcggacctgcctcctggcagaagatgaaggcctgaaacagggcctgtcccagaagctgtgtagcttctgtagtcggcactctcacctacacagtctagtctctgagagatcacagaccaaaatggctcccccaggtactccggcaaaaccctcccgggcggggcaaatacttctcctctggcagggaaggtacccagatgtctggagcccgaaacggggtctgccccagatgctgtgtgacttctgcctctcccagaagctgttagcttctgtagtccacactctcacctgtgcagactagtctctgagggcgagttctacatcttgatgcaaaggcagccagatggagactgtctcccacagcagatagcaaaagggtctcttgtacactgggcggagcctgagcataggaagagacctcaaagcccacaaccacagtgaaacacttcctcccacaaggccacacctcctaatagtgccactccccatgggccaaacgttcaaacccacaagtctatgagggccaaacctattcaaaccaccaaacattgcttccagcatcagactactatgaataatgatgctttaaattaataaataaataaataaataaatatgagttattactttaaattccttgaggatatagtcagaagagagattagtgaatcatgtgattttatttttaaaattttgaaaaattacaaaactgctttccatgatgatcataccattttgtaccttgagcagcacacaggacacccgtgtctccatattctggactttacttcttatcttccagttgtcttcctttctcctgttttgataatagccatcgtactaagtatctcatggttactgtgatttttatttctcttgactatcagtgtttaacaccttttaatgtgcatattggccacttgtataccatcttcagagaaatttctatttaaatccatgtcccttttaaaacttaggatctgtatggttgaattataagagctctttatgtagtttgtatattaaacccttatctaatacatgattgggaatattttcttcaatttgtgtttgccttttctgtttttgatctttgatgtccaaaagcttttcattgtgatgaagcccagattacctgctgttttgttgtctgtctctctggtgtcatatccacaaaaccattaccaaatccagtgccataaggtttttcttattccaagaattctacaactttagctttatctgtaggtctttgatctgctttgagttcattttttaacacagtttaagggaaggtcctgttttgcaaatgcctatctgggtttccaagcaccacttgttagaagaatggatcttctacatggaatgttctcggtgcttttcctggaaattatttgtccacatatgcaaggttttattttgtggcttcttccatcttattccacggatctcgcataagtcagtctcacagaagcacagcactgttttggttactgtagctttaaagtaggttttgaaataagaaatctgagactcccaacttcgttcttttttgtggttgtttggggaattcaagatcccttgaaactgtacatagatttcagaattaaattttgtattctgaaaaagcaaatcactggaattttcagtgattgcattgaatatattgtccactgtggtagtgtggacaagctaatagtaagctttctcggctgtaaatgtgggatatcatccaattcattttgtatatttgatattttttttaaattagcatcatgcaatttttgttatttggtactttctattccctgtttgtctttattcctaaggatgtcattttggagatgtaaatgacattctttccttagcttcatttttggatcatttattgttagagatagaaagacaacttctcttgtttcaaaggataacataaaactgtgtatatacaacaatcttggtttcttacaccatagcaacatttaaattaacatcagtaaattcaaacaaaatgaccagatgatatatagctaactctgaacttcagtaaatacttctaaaacaccagagtaaaaatattgtaaatgttattgtctgtggccatttgaatgagaatggtctacataggctcatatatttgaaggtttggttgaaaaactgtttggaaagtgtaaaactgttggaggaggtgtttcactaacggtgaaggtggcttttgaagtttccaaagcctaccttcattcccagttagtgtgctcgctcgctctctctctctctctctctctttctcccccctttgtctcccctccctctccatctatctttctctctcctcctctatccctctctctcttctctttctttttctgtgtctcatgctcgtgggtcagatgtaagctctcagctactgctccagcaccatgcctcactgactgctgccatgttacccaccaagatggtcatagatgctaaccctatagaccatgaacccaaattaaatcctttcatcatggtgtatcttctcagatatgatctacaaattataaccagagttttttcatccagtgtttgaaaccagacaaaaagtggtaaagaatgtaaaattgcttctttgttaactggaagcagatactcaagagcttgccctggaccatgcatggttacccaaagcactccccacacagcttcaaaagaacatgtttggcttagatgagcttgctgaattattttactaatggtaccatcttgtaaactggactgaggaaagtttagtgggttttgtgtgggttttttttatttaaatgtttggcaatctgttcttctggctccttcttcatcttcagctgcctctgctaacccacacttaattcaactgactaaacagaactgactcctgagtgctgagattaaaggtgtgtacgactcctggacctgagcttttctggaaaaaaaaaaaaagtatatgtactccataagaatagcattgacaaatcaaaaaacatgtttttattgtctcaaacaatgatgaagataaaatagcaaatcagagtggagtgaacaaatctataatcaacacggtacaaacgcactgtttgtacaaataatgacactcaaggccaagtttacagacagtgttatttcttgctattatttaatgtagaaaaactttaatccagcaacctgactacattggccaaagtacagataagtcttttatcccaggagacagaagcaagcagatctctgagctcaaggccagcctggtacagagcaagttccaggtgctttttttttccagaaaagctcaggttcaggagtcatacacacctttaatcccagcactcaggagtcagttctattttgtcctttgaattcagtgcgggtgagcagaggcagacgaagccaagatcaagaaggagccagaagataaaacagattgccaaagttagctagcttgaggccaagcagagcaatacagtgcaaaacagagaagtaagactgaatcagtcagcttggagaagagtttcagccaaaacagctgagttgaaccagtcagagcacagaagctagaaagggtgagcctagattagagtgcacggaggctagaagcttccaggactagtcctggcttagcagactgaggcagtaagcctactagatgacaattacatctggccaataaaaggtacttttacaatttgataaactaatggaagaaccaatcctagccttggacttagcaacaacacagcaactagtctctggcttgtagcacagcaattctaggtaagagaaggcaccatacagcagatcttctattgtgaccgcacaagccaataaagaataaggaatatcaccacagcatctagccaatatttagctttacatatcttcctcagaaacgtgcgtgtgcaacgttctgcctctgacgtgtagcgtttctgattttaaaagtgtaagatttagactgttgatagagcatttgtaggaaatatttactaaagcaagatgaagcccacatgctctgacaaagggaactcctcaggtccttcactgaaatcccctggggtggccttaggcactcactgttccactttttgtccttctgcccttccttccccttccctttgagtctcctctgattacccatggcctccctgcttttgctctccgtagcaagtgaataatgcgcgaataaagagaatccaaaagtgaatgctaaaagtccagtgccctttctcctgaggtttcttgggtaattgtaccaggccttcaattttctctccactcagatctggccagaagttaccaccatttaaacatccttctaatatgtgctttgaatgaagttttaaactaagctttgaattcaatgctagttgagtttggtgtgcatgctttggttctgtgtgtgtgtgtgtgtgtgtgtgtgtgtgtgtgtgtgtataagcatgtatacacaagctgtctgcatctgctttggatgtatctgtatttgaaagggagcattgccagcaatcattgggagcaaattcattcagctgcttgggggaaatgcgagtgggtggaatgccttggatttgttgaaatttatcttcagtgaaaatacacttttgaacacatttgaataagactccatatgcccgtgcacagactgattcgggaggcatagcattgttcctcctccactttccttcttactaagcgagtgtggggagaaggcaccggtgtgctacgtggtagaaaacgcacattcagaaaagcataaagtcctccctcctccctcctagcccatgcatacagtgtgtgctgtgcagcctacatgtaaaatagacatctttctccaagagatgcattgctgtgtgtgtgaagactgccatttcaccacagaatcagacctggactccggccctcgggacagtaacaagagttaagtcttagggagtcacataatcttaggagtctccactcctgtatctctgagttgcactgatgtttcctgtctattaacaatacaaaagtcttgcggttttcctggtcctgcgttctagagaattaacaagaattgcttattggattccatcctgtgcactttattatgctttaatgacacttttaatcgtccagaaacttagtataacaatttccttttttttttctatcaagatttgaacaagcttttattaccagtttgatcagtagtgtggcagaaaaggacagttatttttggattgctcttcaagaccaaaacaatacaggagagtacacttggaagaccgtggggcagagggagccggtgcagtacacatactggaacacgcgtcaacccagtgagtagtccctcataaccccagctcaccccactcccaccctcacccctgcaaacctatatccttgaccctgaatcctctctaccttcggtcatttccttaaattctccattaatgttttcttaatatctcttgtcactaaaatgatcataagaggtctatgtaaggcaacacagggtggccgttttaaggtttatatgtatcgtgatatttccagggattcagctatcgctggagaacagacttgccttagttcttggagagttttgtcttccttacgtcttcccctacagaccctcctcatggtccatcaatcacaaggggttaaccagtctagaataatccagctataagaaatgagccatctaaccaggtcacagttgttaccacatggcatccctggaatgctgttcttgtgggtcttcatggattcctgaagtactgatatcaaagctattattagccctattagttcatctgagtcccagtgcacaaatctgtgcctggttgaccaatttcagcaatgcttttggctttggccacatcctacagtagaacctgtgtaagaataaccttcaggtcctggggaagcttaggttgacagcctagactatacattccttctttatttcagcataaatacatttggaaggcttggtccacttcttgtctatgatgtttcatcagtacaaaggaggcagtggatttcctctgtatctgaaggaaatgtgtgtgaggactcaagctgtgtcctcgcagaaggtcatgggatctttgtacaaatctatctgtccatccagaaaccaagctaaagagaggaaagagtactagtgagctgtgaaacggtacgagacaactcaaggaaaggcgcacacaacatccctgtggtcccagcactggagtgaggctgaagcagaaaattcatgagttggaggttagcatggactacataggaagctggagaacagcttggactatatagagatcatgtttaaaaagccacacgattgggtttggttttgtttttatagtatgtgtgtgccacagagcaagtgtcagaggagaacttgaaagatcaggcaggtcccaggttgaactcaactcgtcagggttggcagcaggtgtcttatctaactagccatctttccagccagtctctccccctctttattttccttactatgaaagtctagccagagattaattcctaattttacctccaaaacaatgataggcaaagtgacattggtttataaaactgaacaatgaagttgtcagtaattcttactatggataacatgactatacgtcacgagtttccctgatcagttccgatctgtatctattatcttgcatcaattaagcacacctatgtttgctctagccttagctgttgagatgactctatatgagttatgtaggtcttttttaaaagaagagagaagtacagtaagaaaaacaagactgtcctctccgcacctcctaacaccaacactttccacttttaactagtgccatcccactggtttgggtgtatgtgtttacagttttttattttatattttgtgtacagctgtgttgcctacgtatgtgtctatgggggtctctgcagacatcatagttatcagagtgttgatccacaagagacagaaagacagtttggttcaacatgacccattttggttcaaacttcaagagtctgactcaaagtagtttgttttaggcatatttaagtgtagcacaatttggaaaaggtctcctggtgataattaactcagtcccacatttgtaacaaaacttaagacatgactatgtcaaaattctttgtaaagtacaagtcacctcttccataaagatgagttctgtagattaactagagaacaggctcgagataacagactggggaaggactcagtgtgcccccacacacacacacacacatagtgcaaaggtcaccaggtgactacctgcatccacttccaggcttcttggcagaaatcaggttacacatctctccctttcagaggtaaacctatgggtttaacattcctggttcccctagtgcttatctgttagtaaaaggacttacatcctcctacacatgtccatccatcgtttgcttgactggcacccacagaaggcagaggagggtttcagatcccctgtaactggagttaactgtggttgtgagccagcacgtgggtgctgggcattgagcccaggtcctatagaacagccaaacctcttaaacactgcatcatttgtctaatcccagtcttttatcttttaacttatggtctgtcctgaagaactttctacaccagtatttataaatcagtacttttagtatctcgatagatattagtttccagcgtgtcaattttaaaaggacattcccatttaggccacagcaatagaaacatgcgggatgaatgttgtatataatataaaatacagcactctaatggttaaagccaggaacattggtaatgagctatcatagacttccacagaggaaggactgttacaactctaatttaaaaaaatggtcaaatttgatgtctatggaaatagaatttactaagtttgaaaaaaaatacagagccaaggaatcataaagcggtgctgagagatttctgaacccacatgactagagggtaagttatatggagatgaattatgaaacgtaagtccaaaggcagtgaaaccacagcttaacagttttttaaagatttgtttgtttgtttgtttgtttgttttatatgaggacaccattgctgtcgtcagacacaccagaagagggtgtcagatcccattatagatggttgtgagccatcgtgtggttgctgggaattgaactcaggacctctggaagaatagtcagtgcttttaacctctgagccatctctccagccccacagcttaaatttttaagctcaagattttccccttattctgtaggtatgggaggcctaacagtttgtctcaagtaaatacgaagatcagaactgcttggctgtggatatagctagtgcttgtctagcctgcatgagactctaggctccatccttaacaccaaaaatgcttgtcttcactgaagatattaagatgagaccaatagccatgagaaatcatgtgggggatagcttaatatgtacagagtacccactactgagtcatattcaaggtgtgatgattttaggaaagttactttctccatctctgtttcttgatgattaagatcaagtgttaaagataatagtgtctaccttaatacatttttgtgagaatcaaataaaatattacagtgtctgctgcattgtaatcttagcctttcttatcacaatgtatatgtaatatctcacttaagtctagaatatctgggctagcctgttaggattcctcagctatatgctctatatctatatactctcattctgggatgagccagccactacatgagcactctggagaagtataagatcccaaaggaaaggctggctcagtctctgttctttaacacctataacccagctttaaatgttttaaaaacagttctttagaacacctgaattaagaaaaaaaaaaacatggaaaggtcaaagaaggacatttatattctctttgttagctacatggtttaaatagctgtgctttccaaagactttcaacccagcatacaagaagcgtagaagtagctatgccatcaaaaaaaaaaaaaaaaaatctgagcacgcctaataattcttagatgcatcaaaaaaactcagagggcaaaaccctaccatctaaaccaggagttctcaaccttataggtcacaacttctttggggatcaaacaaccctttcacaggagttgccaaagaccatcaaaaaacacagatatttacattacaattcacaagagtagcaaaattgcaattatgaaatagcaatgaaaataattttaggagtgggcagtggtggcgcacgcctttaatcccagcacttgggaggcagaggcaggcagatttctgagtttgaggccagcctggtctacagaatgagttctaggaccgccaggactatacagagaaaccctgtctcaaaaaaaagaaaagagaagagaagagaagagaagagaagagaagagaagagaagagaagagaagagaagagaagagaagagaagagaagaaaaaagaaggaaggaagggagggagggagggagggagggagggaggaaggaaggaaggaaggaaggaaggaaggaaggaaggaaggaaggaaggaaggaaggaaggaaggagaaggaaggaaggaaggaaggaaggaaggaaggaggaaggaagaaggaaggaaggaaggaagggaaggaaggaaggaaggatgaaaaggaaaaggaagagaaaaagaaaaagaaaaagaaaaagaaaaagaaaaagaaaaaagaaaataactttagagctggagatcaccacaacatgaggaacctgattaagggagtcacagcattaggaaggttgagaaccactgcttaaattgaagagacagacaagactacagaacctcaacctcctagggcagaaacttacaagcaggggcctagggctgagacaacataactcaacacacacctatgaggatgctggaggctgggtgaggacaactgagagactaccttctggaggtgccatcacagggggcttctctacccccattctgtaagctccgccttcaggaacaatgtcaggttctcacagtgagccttggaaaactgtctcctcacgcttctagctgagagagaggccgaagagactgtttttggaggaagtgtggtactcagttccagccttccccagccattttgtccccataagaagagaaagccctcacagttgaataccgagaacccaaaccaagatgatcaggctcagagggcatagagcatgcccctctgtgacatgcgacctcagatgttcaccaagttccttttaccaagcaaatcacatcctgtggcagcacaactgtcccaatctcagaggcagaatggactgatggaaaaaaactgaacaagcatcagaaccagtcatgtgacagtaagtaattcaagcaaccttggaattatattcaatattctgaaggctttaatggagagcagagtaatgggcattctgaggaagaagacaagagagcaaatgagagacacaaagtactccgaccgaagtgaagggtacctgtggcctattgataccctgcacttgctaagcgagggaaccctgaactacaggttgtgatggagaaatgtaggaaaacctaagaaacagagggggggaaatgaaagcaaaagcaacctacacaagaactgtggtatcattaaagcatttttaaatacatgtgatgaacagcagaaggatgggaagagagatgggagtgggagtgatcctcagacaacgaatgtccccaaaccaaagattcttgaagctcagagaacaccaaacaagagtaatgcccttcccctcattttcttttttgtgtttcttttattgaaattagattcctttttctttcctttttatttttatgattactattattattattattaatcttttttttacagtccagttgttatccccctcctagattagagtctttttttacaatagatcttgattacggtttcccctctctctactcctctcagttcctcagccacctcacctcccaatcacatccatcccttttctgcccattagaagacacacagtcatctaagagacaataataaagtaaagtaaaacaagataagacaaagccaaacacatcagaataggacaatacaaatcaaagggaaagagcccaagaaaaggcacaagaaatgtgtagagaaccaaagactcatttgcatactcaagaatctcataaaaacacaaaaccagaagccatatagatacacaaaggacctatattaagaaagaaacaaaaatgaaaatatttttaaaagaaaaaagatccaacatgacatcatgagacaaggagtgctcaaagaagacattgagctagttttctgttggcatctactgctagacatgcagcctgcccttaagagtagttcatttccccagtgagacttcctgggagaaaactaatctttcctttacacgaggttatcaattggagatagggtgaggatgggggcatgtgcccacttctcctttcagctctaggaccccttctagtacaaacctgtgcaagcaccatcctgcctcaatctctgagttcatatgtggctcagtcctgttgtatttatgaggccttgtttccttggtgccctccattccctctggctctaacactctttctgcttcctcttctgtgggggttccctgatccttgaggaatttgatgaaagtatcccactcagagatgagtgttccaaggactatatctttcaccttgtgcataaacaccaacccagttacaatgggttacaataatgtctcaatagtgtctgtggatctgtggggggggggggttgtttgtttgtttgttcattcgttcgttcccatctgctgtaggagggagcttctgtgacgatggctgaacaaggcactgactgccattaggagtaatctcattgttatgttcctatagtagaacagtggaatttggttttatcctaggtccctggatcatctagtctcaggttgttaagcatgtaagctgtgttaggtatgggttctatctcatagagtgagccctaagtcaaatcaaatattggttgattactcccacaagtgttatggccaccattgccctaacatatcttgcaggcaggacaccattgtaactcaattggtatttatttttctcctttggctgttgcaggatatttgatcacactgtgaaccctgacctgagattgtgttaaaaaaacttgtttctagttgtggtgaggctcagccgtcagcatacacctttaattcctctggctgaaatacttagtatacacctttaatcttaaacaatgaaggtaaagttagtctgttgaaggaagcacccatgtttaaaagtgatgtctaattgagtggcagacaaaatgaatcagggaaagatttgacagaatagcatatgtccaattctcaggggaagagaggaaatggaagctacttaacagagagcaatgcagagaaatacaaggagacagttttgcctggagagttttacagaaacaggttaaagtgagaacaagctagatacaggtgaagatagaacgagccagagaatgagaaggagccagaagattagaatgaattactagagttaatttgaggccaagcaggagaggcagagggagatacactgtattgagtctgtcatcttggagagtcatttgagccagaacagttgagttgatcagccagtcagagctcagatagacctaggaagggtgagcttactcagcagtaagtaagtctcaaaggctgaaaacatcctagagctagattagattgtacggaggctagaagctatcaggactaggcctaggttagcagacaggcaatatgcctctaagataacaattacatcagatgaataaaaggtactttgacagtgtgcagagtgtcttctagtaccaagaacactacactaactcacaggagtgaaaactctaggtaggtaccagctcaccttctccatgttcagtgagttgtacaggtgtggccctcagcaacagggccatgttgtcagtttgtggggaacaatcttgacatcagcgtggcttgtttggggattcccatgggaccccttttggtcaacaactcaattagatacagcccattcccaatactgaaaggttcatttggtgacacggatgttcaaatggggctctgtttcccctcccccccccccattatttggagattttatttctgtcaccttcataaatgtgtatatattttgcaaatcttcaactgtattagattacaccctgctcctcaatggcccttaattttagctgtctctccctctatatcctcccccatctttctctcctctcccatttcctgcttgatcctcccattcctgcctctgctaccttccatctatagctatctattctacttccttttcctagggaaatatatttgttccctgtcccccagttcctctctatatacctaacctttgtggctctatggatttcacatggattatcgtggtggtttgaatgaaaatggcccccatagacccatagaaagtagcagttcactggagtagatgaggctttgttgaaggaagtgtgtcactgaggttgggtttcgaggtctcagatgcttaagtcaggcccagtgtcaggccagcaggaagaagtagaactctcagctccctctccagtaccatatctgcctgactgctgccttgcttcccaccatgatgacaatggactgaacttcaggactataaagccacccccaattaaatgttgtcctttacaagagtcgcagtgctcgtggtatctcttcctagcaatagaaatcctaacaaagacagttatcactgatttaattgctttaacagctaatatccacatacaagcaaatgcatacggtatttgtctttctgagtctggcttacttggatgattttttttaaaatatagtttcatccatttacctgaaaattttatgatttcagtttttaagaactgagcaatactcccttgtgtaaatatatcacatttactttatccattccttgttgaaggacatctagttgtttccagattctcggtattgtgcaatgaccatggttgaacaagtgtctctgtggtaagatggagcctcctttgagtatatgcctaagtgtatagtataggtagatgttgagatagatcgattcccatctttctgaggaactgacacactgatatccataatggctgtacatttgcactctaccgacaatggaggagtgttctccttacccccacatccttgtcagcatggtctgtcatttgttttattgatcttagccatcctgacaggtataagatgaaatctcaaagtagttttgatttcattccccagatgactaagaatttacacataccattttcaaactttggataaataaaagacaaaggagccatagtgagaaagcaccatccatgccctagagaaaagataaggattactcctgacttcttcagaattcaggcaggcaagaaggagtgtgtgaaatatctggtgatgaaggtgggagggaaacccctaagagttcttgctctgtgaaattatcctctgacactgaaggagaactatttttacaagataaaaattgaaggacattttgccagctggccttgcctcacaaggaaaatgatatagaaatgcaggcctacattttctcctgtataaatgaagtgcctaacagggatgagaaggggctctgggtgattgcaatgtgtcactgtgggtccatcagttgtgacaaatgtgtcactgtggtgtgacatctatagtgagggagactgtacaggtggcaggaaggggttgtacaggaacattcaccatcccatcttgctttctgcagacctaaaattacaattttaaatatttactcattttttgtgtgacattacagcaaattgtatgtgtgtgtgtgagagcgtgtgtgtgtgtgtgtatttgtgtgcacgtgcatatgtgcacacattggtttaaggactctcttgacttcaaacagctcagatataggaagcaccatggccggtgttatgggatagtcccctccttctgcattctgaacgccactgtgtcactttgtatcactgtgcagccaagaagaagccattcaaggatcacgtctgtatcctggaattttgttaggagtgtctatacctgtcaaaataaattaatacattttgagccgacgaaatttttggtttcccatgttaacttcctcagggcatatttagatgtctaaaatctggaaatgaagcgcagcgtcctgtcattcataagtttctgctgtaatttatttgagtggcattattcttctctcttttccctgaagcaaaaataatgctgtgatgctcggcagggctgcacgtgctgactgacactgagtaaattgtctctgaataagatgaaaatgtaaattgtttctggggaaaatagcaatataaaaagccctgtgtttcccttttccttttaaattgcagcttgtagaaacaccaccttaaatcacatctcctctcctgcctgtcacaaaagaatccattagctcaggccccatggcagactcttaatccagcataaactgactacctaaattgaccactgaacaggaagccaaaagctttttataaactcagccaaggctgtccttaaggtatacccacaagatgagcaacacaagatgagagcacaattcagccatgtttttcaactttgtcttatgttcattaaatattgtaataaaccattaagcaataattggatcattgttgtttcagttctaaccccagtcctgtctgagtcttttcttgaaacagatctcagatgtcagaatatttcatccacaaatatcgcaatattatcactaaaatacaaggacttccctgtcagaaacatactacaatgatcacatttgaaactataattctattgttttcttttttactggatattttctttatttacatttcaaaagttattccctttcctggtcccccccccaggaaatcccctatcccatcctctgcttctatgaaggtgttcctccacccacccacccacccatgctctcccacctccccaccttcaattcccctacattggagcatctatcaagccttcataaggtcaaggacatctgctccccttgatgcatgataaggccatcctctgctacatatgcagttggagccatgtgtactcctttgttgatggcttagtccctgggagctctggagggtctggttggttgatattgttattctttctatagggttgcaaaccccttcagctccttcagtcatttctctaactcctccatttggggaccccaacttagtccaatggttggctgcaagcattcgtttctgtatttgtcaggctctggcagggcctctcaggagacagccatatcaggctcctttcagcatgcactttttggcatccacaatagtgtctgcatttggtgactgtatatgggatgaatccgcaggtgggactgaaagactccgaaaggagcccctcgctcaggcctcaggacaatagcggacacccaagaactcatgatagaccgagcttgttgcaaaccacatgaggctttattcagggaaagccagagctctggggacgactcatatcccacacaggggtagaggagtcgagctcaaggggaaagaggtcccagtttttataggccctcagaggggaaaggagaaggggggggagtagggggatttccagatctaaacaatatctattctaaaatgattgattcttcaagaaatgggtatgggagggagacaaggaaagagtctaatgaaggtgcagcaatgggcacacacctggtcagaacattggcagacacacaggttcgaggatcggccagagcattgtgcacctctatttttctaatcagtgaagctagttctactaacaatgaaatctatttttgccaatttcagggcttctgtgaccttttacattctgtcaggatctttcaggacagtctctggatggtctttccttcagtctctgctctacactttatctccatatttgctcttatgagtattttgttctccttctaagaatgaccaaagcgcccacactttgtcttccttcttgagcttcatgtggtctgtgaattgtatcttggttatttggagcttttgggctaatatccacttatcagtgaatacataccatgtatgttcttttgcgattggattacctccctcaggatgatactttctagctcaatccatttgcctaagaatttcatgaatccattgtttttaatagctgagtagtactccattgtgtaaatgtaccacattttctgtatccattcctctgttgaaggacatctgggttctttccagcttctgtctattataaataagactgctatgaacatagtggagcatgtgtccttattacatgttggagcatcgtctgggtgtatgcccaggaatggtatagctgggtcctcagggagtactatgtccaattttctgaggaactgccaaactgatttccaggaaactataattctttaatgtcatgaatcgttcagttaatgctcaaatatctaaattagatagatagatagatagatagatagatagatagatagataatcacatatattctaactactatgtagtatatttaaggtttgtttggataaggatctaaataacatttacatactataatatattagtaaagtttcctaaagtttgttttaacatctaggtttcttatccatccctttttccttttgtagtgtctttactgatgtaagagggttattcatcctatacattttctaaagtccacacctcattgtttaatcaaagacctgatcaatattgaggtttattttacttgagaaaaactatttttaggtagttacttgttttgtgtaaagaatcagaatgtccaattttctctttgtgacaggaagtttttgatgatcaacatgtagatttgttgatttgacagagtacggttttgttgttgcttgttttggtctggggactaaactcaaggtcttttcctgataaggaagggctcccctaccaaactgcatctcctggcctgttctaagtgtctcaatttatagctgggatatttccataagaaagcaactctttacagttttctttgctttgtggtacagatggtataggaaagccagcatagatgcttcgcatatttctcttcctagttttctagtttccagaaggattatttcctcgatagtgtcttccaacagtgagtatttggaggctaaggggtgcctccagcctcacaatgaagtaagtactttaagcattggtctatctccatccactgcagctgttcctagcactcatgccctgtctgttggatggcaatgtcttcaaggatgcgacccttgcagtcttccacatgcccttgctgttgctatgaccagaagtgaattcctgcaccaggtcatcaggaagccccaggttttcctttgatgggaagaaatgtaatctctacactaatctggccataagggggctcactgtgagtttgttcttgtttatcagctatttccttggacaggtctgggaaatgtgttgcctgtgtgtttgcttgcactgcacatgtgaggatgagatttttttttcaaacccataatttcggtttcaattcaggaccacagatttattgcttaatttgccttttatctgtattttcttttatgccacaatccttaagtctctcaacaccaggaaactctgacattctccttttttaaaaaacagcaaaaggactctccagccttagcattttgagagaagtagaacattccttaaaccatgaaagctagttttgaaccacactagccattgctactgattaaagagagagagagaataatgcatagaaacagaaatgttctttgatctgagagaacagatccagttagtaaagagagccctgcaggggcaaacaggaggtcgtctcctcgtaaggtggcacaaagcttctctagggtaagtgtgtgcctcagatgtgtcccaacagattaaaagaaggcctgaaatcactatttcatggcattctgtaacttcagctctgcatcaggaccattccttgatcagtcatgtaggaccatccagggtacctgggcactagttcttccaaatcagttgaaacctgccagttaagggcaactggaccccagcaaagccagacagacttgtatccttcaaggtgcccttcacagtgcaagggctaggaaacccatcacattgataaaccatggtcagcatggtcaggtttaaggctcctctgggttttgaaatgaaatgccacatactgggtatgtgctcagccttgtttctgagcacatttgcaggttgcttcatagccaagcaaggtaaccagtgataggcgttcttcaagggaatcttgtggcaatacaaggagagaaccatgctgggtggagggtactagaagtgggtggtacacaggacgtgaacttagtgcaagaggaggcctattctcactagctttcctaaaagactgaccaaaagcagcttaggaagtatggtagtttgaatagttacgtcccccatagactcatgtgtttgaatgcttggccataaagagtggcactatttggaggtgtggccttattgaagtaggcgtggtctttttggaggaaatgtgtcactgtgtagatgggctttgaggtctcctatgctcaaaaactgcccagtgtggaatcagaagcctcctcctggctgcctgtgagagacagtctcctcctggctgacttcagattaagatgtagaacttctccagcatcacgtctgcccgtacgccaccatacttcctgcgatgatgataatggacggaacctctgacattgtaaaccatccccaattaaatgtttgcccttacaagaactgcttatgtaagacagaaggaaaatgtttatggggcttacatgttctgatcataacagtccatcatcaaagaactcaagacaggaacctggagacaggaactgaagcagagaccttgatggaacgctgcttagtggcttgttcactctggctttctttactgcctaggtctacttgcctagggatggcaccatccacagtgggctgggcctcctgcattaattagcaatcaagaaaatgtcccacaggccaatctgatgtaggaaagccctcaactgaggctccctcctcacatatatgtgtcagttcatgtcaagctgatgagacctaagcagtaccagagggaccatagcctcaagggaacttgttcctttaggagctgtatatacatctctgggtttcagtaccatctcacagttagactctgataagtccagtttctaggctaggatcaagtgctctaagtctgcagcctgtggcaagttattacatctttgagcctcaattttactatcagaaaatgctaccagagtctctgcctctgagagttttagaagttaaacagaagaaagacagcatagagtggctgacacagtgctaagcagattgcaggtattcagcaaagtttaccttccctgtcccagaagctctgtcttactgtagaagagggaggggagagggaaggtgaggcaggtagagacttagaagtaagaatgtgtgagtcctgtggaagggaattggaagcaacttaccagaccaagtcaaattactctctagagacgccatgccccagaacaattccttcctgccctgagaccacaattgatttgatttggttggattatacctaaggatttgaccagagagatcaaagttgatagcttccacagctcaattcactttctgtgattagctgccgcacatgggaaaatctagattcatgaatttgagtttcgtagttacaggaagtctctctgttggtggtttagggagatggtgaaggggagcagggtggaatggtgggtcaagagaatgcattaaaatgtgaaatttaaggttcaccaatgaggagagggatggtatcagtccttctccaatgagaagtgggttatccaatggaaaggcagtgttttgggagaagcctgcctctgccccttttttctatccctcccttattatttggctcggcaagcttccccacaaactgacttacaaattccttgtgtgtctcccttagcccaacatccctttattacaccagtttactgctgctctggggctgagacactaaaatttgggtcaaatgatacattaagttaaccactttagaataccaataacactcctgcagcactttccatcttcatggtgggccacaaacatctccttcctcactaatgaagatgacttgaatatccacagcgtctaaaaacatagctagttaatcattgtctaatgcggggaagtgagacaaaatgcaaagccaacaaaaaaagtattactgtaaacttgctgagtcaaaccttttaaacattcttgagcacacagcagaacttatatcattaaaaaaaaaaaatcccagttttgtaataaaaacgcccataagaagtataaagatggtgctagctttctgtttcacaaagtccttttttaataatgatttcatttgatcttcatgaagacccatgagtagaaaagggattatctagtttcaacaagacttgttgtggttaattaatccattcaaatgtcaagttattaaatatttgtgcagagactagaatcacagacttaaggcttagaaattctttctagaaggcctcctacctctgtgggaaagccccaacaggaggcctcaaaggaagggtggggggattagatgagctgtttgtttcccacggaccacaacagcccagtggtgtagtagtgcatatgggccttacatctgggttccacagttcaacttaacttcagaaagcagataccttccctctagtgcctacgatccagctgggtgacgggcctcatcccaaagttatactcactggaccagaaaacattgtcatgaactgggctgcctacctcctccctaccctatcccaactccatcatgagttctgagtagttgtctgggccactgtagatgtctgttggcctttgtataacccaacacttttctttgttcaatgtaagccatgcttagtgtatttcctgctgtacaactgcttgtttcacctttgtgggtctgtctgatgcataagcttgtctgtatacataaggacaattctagctacctgctatctaaaaataaaaagtggccatttcttctaaggggaagttaaagcagatacatacctcatgccaaacaacttcatagttttaaaatgcttttatgtccaaaactgtcatgaggagtctccaggtgtaccctctcctccagtgtcacttgatttttataaggccaccttgaaaacccttttcctttttcatccttcaaaaatcagctcaaatggcacctcccaaactctttgctgacagagctctttgggaacactctgtttctccttctgagctcccccaaccccctggctgctttgagaagaccctaccctgtatcccagcatgttgtagatgcatcctttctggtagttgttgaatgtcagtttcgttcattgaatgatcagcctgcactcaaggggaaacagggacaatggcactgttccttgaagcagctagctaaaccagtccttagtctcatccaatttgtttttaagaagtaaaagggtttatttggcttacatttccacattgtagtctataactgaaggaagccaagacaggaactcaaactgagcagaaacctagaggcaggtgctgaggatgaaaccatggagggatgctgcttactggcttactcacatggcttgctccacatactcccctataaaccactttccaggaccacatccatcccaacagagactaggctatcccctcactaactgagaaaaggccttgcagctggatctcatgaagatgttcccttaactgtggctccttcctcttttattttttaagttggatattttatttgcttacatttcaaatgttatccccttccccagtttcccttctgcaaacccccatcacatccccccttaccctgcttccatgagggtgctcccccacccacccactcccacctcaccaccctagcattcttctacactggggcatcaaggctttacaggaccaagggcttcccctcccattgatgccagataaagccccttccgctccttcagtcctttccctaactccttcattggagtccccatgctcagtccgatggttggccacaagcatcagcatctatattgatcaagatgtggcaaaacctctcaggagacagctgtatcaggttcctatcagcaatccttgtgttggtgtctaccatctattatcctttgtaagactggatttgtggagagatattgagtaattttggttttgtcatggaatatcttaatttctccatctattgtaattgagagttttgctgggtatagtagcctgggctggcatttgtgttctcttagggtctgtataacatctgtccaggatcttctggctttcatagtctctggtgagaagtttggtgtaattctcataggtctgcctttatatgttacttgacctttcccccttactgcttttaatattctttctttgttttgtgcattttttggtgttttgattattatgtgacaagaggagtttcttttctggtccaatctatttggagttccgtaggcttcttgtctgttcatgggcatctctttctttaggttagggaagttttcttctataattttgttgaaaatatttactggccctttaagttgggaatcttcactctcttctatacctattatccttgggtttggtcttctcattgtgtcctggacttcctggatgttttgggttagaagctttttgcattttgcattttctttgactgttgtgtcaatgttttctatggtatcttctgcccctgagattctctcttctatctcttgtattctgttggtgatgtttgcatctgactcctgatctctttcctaggttttctatctccagtgttgtctccctttgtgatttctttattgtttctatttccatttttagatcctgaatggttttgttcaattccttcacctgtttggttgtgctttcctgtaattccttaagggatttttttgtgtttcctctttaagggcttctacctgtttaactgtgttctcttgtgtactggctagttttgtgtcaacttgacacagctggagttatcacagagaaaggagcttcagttgaggaaatgcctccatgagatccaactgtaaggcattttctcaattagtgatcaagagggaaaagccccttgtgggtgggaccatctctgggctggtagtcttggttctataagagagcaggctgagcaagccaggggaagcaagccagtaagtaacatccctccatggcctctgcatcagctcctgcttcctgacctgcttgagttccagtccttactcccttggtgatgaacagcagtttggaagtgtaagccgaataaaccctttcctctccaacttgcttcttggtcatgatgtttgtgcaggaatagaaaccctgactaaggcatcctgtatttctttaagggacttatttatgtccttaaagtcctctatcatcatcatgaggtgtgattttaaatcagagtcttgtttttccagtgtcttgggctatccagggcttgctgtagggggagaactgggttctgataatgccaagcagcctttatttctgttgcttgttcttgcccttaccatctggttatttgtggtgttagctggtcttggctgtctctggctgtggctttttcctcctgtaaacctatgtgtcagcactcctggaacacaccagttctctctaggtggaatttctatatggagagctgtagcacagggtctgctctggggcacagacagaaagtggaaggatcctgttccctgctgttccttggttcctgtgtcctgatggctctgggaaggtcccgcttgggccaggaatttgagcagaagtggtggtctcaactgtgctctcaggtgtgtcaccacttctgggagaccagctctctcccagtgggatttgggtatggagagctgtggcacagggtcagctccaggccaaagacagaaactggaaggatcctgtcccaggctgctcctcagttcctgtcggtctcatccaatttttataacaggattgttttcaactaatatccattggaatgtgaaatgtaggtttttggtggtcctataaattgtatacattttgtacaaacttaagaaacttcatttagtctagatgttgttttgatgggccaagcatggtggtccacactttttttcaggagacagagaaaggaagatcacaaatatgatacccagcctggactaattaataaatccatgtcttcaaagtcttcattagaattctgaacacttgtttctatgaaagagttatttcgtgctcaacacacacaaaagagcaagtgaagtttcatccataactgaagacattttacctctaatattttacacagtactcactgagctcagtgtgctttgtgtctcctttagaagccatctctcccttcatttccctgatagctgccgtttctgcctccaaccccctgagatcccatttcaagactttatctcattttctccattctccatggcttgtggcttagagtttgggtctttgttgtgtttcttgtctgccttgaatccattattcatctgactagtttaccctgatgcacctcgatctcaggggatgagcattgtgcacttctcattgtgatcctcgaaatgaggtgcggtggggcattcttcagcttcacgtcggaattgcacctcacttcccatcactcaccacgtgagctcaaagcagacaatgtccaaatttcaggcttcacagcctcttttcgctcatgatcctgttttctgttcttctctccagagatgaagagaaatgagataattgtgccaatgaagcatctttcttcatctccattgttcttctctggtgcttcattgtgatgtgtcaattattcaaaactccagagagctgtcttttggaacacaaattgttccaatcatattatattaagatggtgtgttttctgcttttaggcaatcgtggtggctgcgttgttgtacgaggaggaagttcacttggtcgctgggaagtgaaggattgtagcgactttaaggcaatgtctctgtgcaagacaccagtcaaaatctgggagaaaacagagcttgaagagagatggccgtttcacccctgctatatggattgggaatcagccactggtctggccagttgcttcaaggtgatgtcaaaactatctgcatattcatttggtccatggtcctctccctttttttttttcctaagctttctgtcacagggcctggtacacagcatatgcatagcctctatccattgcctctctcctgtgtttatattccaaataattctgaatctttttaaatagcagctatccccaatgtcactaaaaacagaaataccatgtgtcagtatcaatcccaagaaatagagccctatgcacgaggtcagcaccctaggaaaggattctaaatgcttgaccaggtcctagaactggtgggaagttttgtacaatttcacctgccagagttcaagtccagtatggcagaccactcctataagtcaggcatatctactttactgttcacagataggctacaagaaaccttagaaacctaggatcctggcaagcctatcccttgaggctcaggacagctacccaggatggcagattgactatatttctaccccagctcaggggttaggaaagcgctcttctatgggctttatgcctcacaaacgacttgggtccactggaatgaaacactgcaggagtccctgttctgggagggacaaggacagtccctcctttcctcagagtgtggcattctcagtacactctaaaccagatttgcaatcaagaaggagcaaagtaaggccagccatggtcacttatgaaattgtcttcctataatgagtacaaaggccagtcagtgctgtttgtattgccaagcgtgaagcaaataaaggaagccagcacgcagtgggtattaacattgtgatgttctgtattgtttgtaagccacacataaagtactattataaaataattcttaaactaaagaaagactttaaaacctgctagacacctgaagaacaaaccaggtaatatggatggttggtatgtatgtgtatttgtgtatgtatatatacatatgtacctatatgtctatgtatatatttacataaagatatatatttatatacacgtaatttccctaaaggtttatttgcatatttatttatttatttatttatgtatatgagtgctctgtctccatgtatgccagaagagggcatcagatcccagtatagatgatcatgagtcactatgtaagtgctgagaattgaactcagaacctctggaagagcagtcagtacttttaaccactgatccagctctccattttatatatttacattatacacacacacacacacatatatgggggggtgcacgtaaatgcttaaagcaagaaggtttggaggttaaggtgttacaatatttacatatacataaggagatatcttaagattgggacttaagtctaaatacaaaataaatttgttttatataccctatgtacatatggcctgaaggtcactttatgcagtgtttagaacatgaaatggtctacccacttacaacagtaagaaggcaagaatgtcacttccacacaagttttagatgttaagaacagctaataacttcaatttccagattaagaatgttctatttatctatatatatcatgagacgtacacatgatatacatgcaaaatcctggaagaaatgtctgcttgcaaatccgctttagatccgagatttaaaccaattctcacaactgtcttattagaaatacccacgttttaaaagttagtctcatgtttggtagtcttctcttggttcatctgatagggagaaattctccaaacctgtgggaaagtccttcctcatccactgggcacatccaagacggagacagacagaactccacaaacactgccgtaggaatgtaaccagaaacacgattggacgctcttcatttaaaatgtacacacaagaaatccctacataaaactcgtaaataaagaacccagatacaacctcatggagcaataagttaaacttcagaaatgagtgaatcaaagccagtttgatgaagtgattggcccaagatcacaattatttattgacagagttggaataaatccctgggtcttgggactagcggtacagtggtattttactatctatcaccctgacatgtcaaaaatgcaagttgtgcccgatgcgcgtgatggtggatttatgaatttagagtgattcaggcagaggttcccaaaggaggcaagttttgacgtatcatttaaaagatggaaaggctgtgctgtggtccacaggatttggaaaggcattcattctggtctcggcaaatcagagcccagggaaagctggccagagattgtatgtgcagcatcagggggtcaagcttagcaaccttatttacaaacagtgagggtgcagaggccccagattgggagctctgggtcttcggcctcctgcgggatcgtgagacaaaagcagatgctccaaaagcaactgcttcctggtaccacaacagctggtacatggcagagaagttagacatcatggagctgtcagctcatcaaaggcccaaagaccctagaaacagacctgctcaaggccttgggcattgtttatttttgcctgtgatggatccaacaacgtcattgtcgtttcttgaattctaacttgccataggcaggctgccagaatagaaatggatggattctagaaacaaggtattctgggcctaagccaagtttataggtgtttataagtttataagtttataggtgtgtgaccttactgtattcttaatgtctcttgacctgattttccttatatactgacaaacaaaaagagaaagctctatgtctgtcataagaggtttagtgaaaaagaagccaaggaaggtagagggagcagaaaatcttttaagaactagacatattctggtgtgatatatgttactccttcaaatcaaaatttcaatgatgaataagaaaggggcagatgtctggctcagtggaaagagtccatgctcagcatagaggaagtctccacttctcccctgaatgcccccgcaatagagtaaagacaaggagcacttggcagctttgtgttgctctacaggtgtttcatagcgaaaaggtcctgatgaaaagatcgtggagagaagcagaagcattctgtgaggagtttggggctcacctcgcaagctttgcccatatagaggaagaaaatttcgtgaatgagcttctacattcaaaatttaattggtaaatacttactaattttgagaagattatagtcaaaaattgtctcttagcagtgccttcttagggatgaatatcccaagtggttgtttacaatgtcagcatttgttttgcttttaaaaatagctagtcactgcttgtgacagaaaaatatgatcctcatatagttttgtgtttatactgcaccaagttcacaatgcattaaaacaaagagcaaaaatgatcattgtttagatagtcaaatatttttttgtgtcttctatcagatattttcagagctttgcttctaactgtatctagtttggtggattttcaacatgttctctgaggattcagggggtcttagattagatgggactatttgggcagagctttggttccttgctttcgagcccccagaaaacataatcccattccactgataagggttttccatagattagagttcatttggttggggaagggaattccatcagtttaaaaacaatccaaaccagcgctctaattgtacatttgaaaaaaaatcaatggtcacctattagtgtgtatcaactgttagactgcccatgctcatgcagttataactgtagtctggtttttgttggttggttggttggttggttggatggatggatagatggctggctggttggtttattcattttgtttgtggccagacccagggtatatgataccactgagctaaattcccaaccctgttaactaagtttaaattggaagtaactaaaggcttcataaagtactcccataattatttacctttaatgtttacaaaaaatgaccttgcatgtgatcttagagtggttccatatggagaggatttggtggagaagctattgttattgttctttgagaggggtgtaacatcagagggatcaaataaaactaaaaaaaaatgtacactattagaaatatgctatgaataatcagtattacgaagacttctagcaagaagtgctttctctacaaatggttttccctctgaaataatcttaacagcccatggaaccacttgttcgtaccggaaccactgacctaagctcttggtttcagtcggagcctacatactgggcaccttgggagacagagccctctatggcacctcagactttgtgagactggtgttgaagaagcttccacactgactggggtgctttcgggctctgagggacagcctccactgtcccatgttctgttgtgctttggaactttaaccccttgcaagccatgcttacacattctgcccatagaccagatctgtaaacactctccctttaaagattgaaggtaatgacattctttctgtccatacttaaaattcctaccagaattctgtgcatctttcaaattattgatcttttgcatctgaacatgaaagttgtatgatttatgctttatttttgctcatgctacgaagggaattcagctgtgtcaaatgtgtgttattttaaaattacacaatttaggaaattagtggagagaaataaatatcaatttgtcttctgtgagccagtagaacagggaaaacaaagaacgggaaaatcagtgaggaatagaccaaatgttcccagtgtggggagtgtgaagctggttcctagcccgcgtcctggaggttaacagccctggcctggcttccacaggtcaccctcatcttctcagaagtgtgacatcaccagtaggcacccaggcaccagtgaccgcagagactttccatttaactttgacctctgtctaacacatgggagaactgaccccgcagagtgagcgcgctcctctgcgttaagcatgagaaagcatctgtcacgacttctgagtctcttaaatctttaattcttcaaaattattctcagaaaattatctcagtgagatggttcgttgtacaactaggctttattgcttgatttattgagtaccccgcgatctgacagatttgttctctgcctaataggagggacgatgattctctgtgaagtgttcttgcccagtctaaaccagtggtgacttctcaagttaatctaccatggcccaggctgatttgcctcagagttatttatgttggaaactggaaggaaaaaaactccacaaactttgtgtgtccctgttagtagatggggatgataggaataaacctgtataaaatacacgaacagttggcaaaagagcaataaaccaaaccataggaaaacatcgcagaacgcaaagtccagccataagtagtagcacacttaaagtcatccagcgatgctaagctctaggatttccaggcagcttacactttcgtgtgctcatggcctgattgaaggatgtttccattcttgatgacaagttcctgttctcagtatatgtttatttttctccccatgagctctgagcaagccacacaggagcatgtgagtctagacacctcccctcatttcacaaacccaggactttgcatgcaaaaggatgcttgatccatttattgtctgaccctgctaattagcgtcggttccttctgttcacggttcaccggctcgcagaaccttccatctgatgttgggaatgagattgaaaataacacttttgtttcttctcttcccaggacacaggaaaggcagttctggattggatttaatagaaggaacccactgaatgctggttcttgggcgtggtctgacgggtcacctgtaagttgtttcacactatataaaggagatgtagccgagccaggcggtctgggactcactcggtaaaacaaccaagaggacccggaagtggctgtagcactttgggaaacttgcctaggccttggctaagacagtggttgtaccaaggtcctgggaaatctcaggtgactatactgttctgagatgcctatatttcatcctgaaaggaaatccaaatctccaaaaatactcccctaatctgcttcccagtttagggaaacggctggtctttacagtaattccaggcttctaagccaccctccttttctgcagactgcctgactgtctgagtatgtagcctttctccatgtcacagtgagaaaaaaactacccagaagcttatgagagagcttaatggaaagcatgcttgctctgtactcatgaggacctgagttcaaatctccagtacccacataaagagctaagcaaggaaaggagactggtgggtctctagaacttactggccaaccagcctggccagaacggcggggagtttctggttcagtgagaagatcctctgtcaaagccataatgcagagaggtcaacagagagaaagacacaggacacccttctctggtctctgcctgtccccactccccaacacacacacacacacacacacacacacacacacacacagagagagagagagagagagagagagagagagagagagagagagagagaccaagagagagaccaagagagagaccgagactgagaatatttttactctatctttgaaaaaggacaaagggcatcagacttagaaataactcagaccaggtagtttcagaagggcaaaggtttgcttttcagtccactccatactcacaaactctgggaaagggagaaaggacctggaaggtgcattgtttttccaggtgcactgaggaactctcagatttctatcaaggtgacaaggaaaattacatgacaccatttcaactctgaaagggggcggttagagccagccttcagggaccatttgagacagcttctgtttcccagaccttcttaacagcctgtgccagtggacaatagaacaattaatccacataaagtactacgcagggcagccaggatctgcacacaggttgtccagggctgtcccactttgtacaataccagcagccaagtgtagataaagaccagcttgggaggggggtggggaaagcctattcaaaggacagggttcaaatttgcagctgagaggagagttaaaagaagagaagaagaaaaaaaaaaaaaaacaaccaaacaagaaaacctgtgtgcttctacagggaacaataatagcagagaaatgctagtttaaacatgatcctagccccattttccactccaacattgctgctttgaaaaagagtgtcaagaatagagtgtaaaaagacgtggagaggatttggatccctcagctctgcccatttcttttgctaaagaagcagctgagacccagaaatggaagggatgctaaagccattttgctcttggggaataaaacgaagcacattagaagttgaaatactttcttttagtcactcaaactcgctcataacagaaggacaacaatttgcttaagaagcaagcgcactgatgagactacacgcactgatgttctgatgatgctcagcacagcccactggacgtaactcacgtcattctcctaacatgaggatagaagcaccggataagctgatacgtgcctctgtgcatatttaaatagttcaaagtggtttcaatacatccttttatttttctacattttaaccttaatttcatttgtggttcatctacatttctgtcaggtaatcattaaatagttgaaaaggtttacacctcatttaaaaacatctgttgtaggaattatatataatatgtggtcactcagaacaatgctagttttctggtttatggaagctatctctggagccaggcatacagtcacatgcctttaatccagcatgtgagagacaaaggcaggtggatttctataagtttgaggccagtctggtctatacaatgagttctgggccagccaaggctaagtactgagatcctttctcaaaaaactaaaactaaaacaagcaaaaagacttagattttagtccttaaaacataatgcttagcattttatttaagtgcttagcaaataactggcatcaaagatgataccaaaatctgggacatccctaaaactctaagcttaccccaaaccccaggaaagagttgtctaagtcaatggtctcttgccatgaagagacaccacgaccacagcaattcttacaaaggaaaacatttcattggagctggcttgcagttcaggggtttagtccattatcacatggcaggaagcgtggtggcacgcaggcagacatgctgctggcaagagagccaagcgttttacagccagattggcagataccaggaaggagagagaagtctgagccaggctctgcaactgaacctcaaagcccgcccccagtgatacatttcctcctccgaggccacaggacctaatcattgcaaacagtaccactccctatgagccaaggggggctgctattcaaaccactatgacattacaagctcagaataaagtgtgcatctgatttcctctggagaaaacagtagaaagattcttgtgtgcatgcacgtttgagcacatctgtatgtgtggggaagccagcagtctatgtcaggtgtctttctcaaccacactctaccttttttgagacaggacttcccaactaaccctgggacttatcaattaggctgtgctggctacccagcaagcccggggttcttaccttcagttccgcagtactaggatagcaggcatgcactactctacgggatttttttccccttaatcatcaatgtgggtgcttcagattgaacccctgtccttatgcttggcacagcaagcacctgactagctgtcctatctccacagctctgcatacctttttgtaagaaaaaagaacaggaaaaaaatgtgaagtacccttagtcttcagaaatgtggatcaatcttaccctggaatgacatgtagacttttctgaagattcctctgaagtcccttaaacagtggctctcagccttcctaaagctctgaccctttaactcagttcctcatggtgtggtgacccccaactgtaaaatgatttccattgcttttcctaactgtaaatctgctactgttatgaatcgtcgtgtaaatgcctgagtattcggatggtttgtaaaaggattgttcaaccccccagggggttgcgacccacgggttgagagccactgccaacagtgcttacattcctgggtgccttgagtcttctgaaactccttttggggggaatcatcattgaggaataatgaacttcgtctgccgcaggttgtctcttcatttttagacaatgcttattttgaagaagatgcaaaaaattgtgctgtgtataaggcaaacaaaacattgttgccctcgaactgtgcctccaaacacgagtggatatgcagaattccaagaggtaccagctctttactgtatgtatgtttgcatttgaatgatacgcagcactttctcaaatgaagggtcccagagattcataatctcagcactagagccctgagccacactgccaacaacctgcctgatgaacctagctacgctagcttagttaaagccgggagcacagtcaaaggagggaagacagttcggtaccctgtgccaggctgtgcattaggaatgaaggtcaccaagagtaagcacagatgaaagaaatatccctctgacatcacgagcacacaggagtgttgcgctctgagggtgcggacgcacccagcacagtgtctcacacgcagtagtcgctggcatgtgactaggtccttgttttaggactcgggagattcccctgcatattctaactcttcacagtctagacagtacagggcatatctggccttaaacttatgtttttgaaggtgacataagaatagcatggttagagctgagggagtgcagaaactctgcagaagtctcaggcaatgtgttttgcttttgctctgcagatgtgagacccaagtttccagactggtaccagtacggtaagggccaacttgacagttctctaacttctaaatcacaccaaggagaggctggtattagtgcattatactatctttccacacacccattctcttatatatcaacctgggactgattagttcaaatcagcagatcaagaagggcataatcaaagtaatagatatactcattaagtggggttgaaattaacatcatgcctccattttcacggcatagtattttaaaatatggatctatccctggcctatgaaagctagtgaagggggctagagagatggctcaatggttaagagcaccaattgctcttccagaggtcctgagttcaattcccagcaaccacatggtagctcacaaccatctgtaatgggatctgatgtcctcttctggtgtgtgcctgaagacaactacagtgtacttacatactgaaataagaggaagtaaacaaataaatctttttaaaaaagaattatttttaaaaaaagaagaaaactagtgaagggttctcaagtgaggtagactaagaaaataagtgaattataggtatgcacacatgcacatctgtgcgtgtatccatacatccttacaccccctttttaaaatgttaaacgaccagattacagtctgggagtcaatcacagcccacactccttcaagcccgccttacatctctcgctggtcctgagagcatcctcatgatcacacggtttccttgcagatgcgccgtggctcttctatcagaacgccgagtacctcttccacacccacccagcggagtgggccacctttgagtttgtctgcggctggctgcgaagtgacttcctcacaatttattctgctcaggagcaagaattcatccacagcaaaatcaaaggggtacacgaacacaaatcacttcacagaattcatagtttacaccttccgtccttgggggaggcgatatttttaaaatttgactctacacattcatttaagtttccgtaaaagtcctggctttcttttttttcagactcttttccctctgactatacagattcatagaaaattatggggacgtgggttggttatgcccctttgacttctgtttcttctgtaatagcaagggtattaagtgagagtcattcttcactctctgggccactctcgccactcgtgagggcttcctgatctaatcactttccagaggctcacacttcccagcatgtcatcttgtgagttaggatttcaatattaaggactgggaagggaggagacatctacattcggtgtggctgtagatttccaagcagtatttatttctacccacgattggtacttttggttgtcagtagtacggtggtatttatggtgagcattagtgtttcacacgtaagatgtctcatgtctaccaatatgcttgccaagttggtggatgcaggggaaattactgactctaggatgaggaatcaaactcagcaaaggtgatatggctcacttttgacccatacctggccaaaaaaaaacatcaaaaaagttagaataaataattattttgaaatagcacggtttcatatcacttttctatgaagaatagtcactaagactgtgaaaggcaaaaataacatttatttggagtgtagaagaatttaatatgagatagaaagctgggtagagtttttctaacaaaaacaatttttcttttgaaggatgcttatgttttctctgaatctctgataatagaccatggggtgttagagtgagctttgaatatttttcttttctctaatcttctctttctgatcaacgatgaaaacattaaaagctacagcacttgagagtcagaggacttgattggcttaccaatcaatcacttgtatctgtcatatacagtatttgcactttaaaactgcaattcactcttttaagttttgtgtttgtaagcatttctaaaactgtatatcaaatctattacttcttaaaatctggctgtttaaacccttaaactaacgcccttgatcactttggtagaaacctaagagatgacagattgcctttgctgaagaaagttgagtagatgattatgttggcttgtgtgtctagctcactgggaaatgacctttcctgtcagttaaccataaggctacttgagcataacaaaatataactgatttgtgaaatgcatgctcatattacatttcttctttcaaacacctattattaggtttcagttgttatggctgtatatacctagctaacatttaaaatattcacttttccataccaggctgttttgtcatctttcagcttgtcctgtaaagttctctaccacatatgtcacagctgggatgcactatgtggcagatgatcatatcttaaatcaggtggcaataaatataccacttaagatataaatgtcatagaaacaacaatatgaactaaccagtaccccccagagctccctgggactaaaccaccaaccaaagaaaacacatggtgggactcatggctccagctgcatatgtagcagaggatggcctagtcggtcatcaatgggaggagaggaccttggtcctgtgaaggctctatgtcccagtatagggggatgctggggccaggaagcaggtgtgggtgggctggtgagcagggggagggggaagggggaggagattttcagaggggaaaccaagaaaggggataacatttgaaatgtaaataaagaaaatatctaattaaaaaaaaaaaagaaaaagaagatataaatgttataacttccccttaaaggtcctaaactgggagagtgagtggtcaggctatgattttgactgctgttgcccatgtgccttccttagatgcaattaagttgtagtcttcctgccgtatccatgccaatctcaacggaagcactccaaagtatgaaaatggggctctgaattcagcatgtgggaacacgcccacggaacagtgcctcagggatctcaaattatagtggctccccctttgcaatattctcaaattgctgctctggcagacagccatgctggctaagaagtaaaagcacacttgtttcaaaataagaatgttagcaagctatcaggttctgtggtagtgacttgcaattcatatggaaataaataatgtatcttaaaaatgtatccccaagccctcccaaaaggaaataagagtacaaatttaaatacataaggccttaaccttaatagggtttgggcatataaaagttaatttgaattttgatacacatacagagggagcagatacgccgtaaagcacactgctcgagagggctcagtgaaagctcatctgtcccttcctcttttgtgattaaggagaaggcttcaatttcctggaccataagtccagcatgatatctgcagtgcagtgtgtacgtgagtgtgcgcctgcatgtccatgcttctccacttgatacttcactgtgcttagactgggtgattaataattgactgtagactaataaaatggataatttgctagctttcagacattggaattctgtagggttgttttgtcctattctctctctctctctctctctctctctctctctctctctctctctctcctctctctctctctctctcagtgtggacactgtctaaaggttcacagactaatatgcttagactctaaatctttattctgttaatgtctttgtaccttgtttgtcaaataaatgtgacatctgcagggagcttccataaatcactgagagaagaagccactaattatagtcagaagaggtacccgtctctcttttatgtcacgtgacttctcacagagttagaagccttgcctttcaagttgaatgaaacagaaatattttcagtggttcactatcattctctttcataatgaacagggaatgctttagaataattcaatttcacgacttctctagacactagcccttagctcgttactcttctttacataacctggtaacattgtagtaattaaaaaaccaatagcaaccccattgatccaaatagtagaacaatgtaaacaagaacatcaaacactgacatgttctctctcccttcccttcaatagctgacaaagtatggtgtgaagtggtggatcggacttgaagaaggaggagccagagatcaaattcagtacggaccgacactaatccatgtttaacgttatttgacaagttgtgtgtgccaaatgatcaggctgggttttgataatcgattcgctgaatggccttcacctgttatccttaacttacaaattttcattcgtctaacaataggcatgagtgcttttcagttcagtaccaatgaaaccatcatcaaactatccgacaaacatatcaatttcctgtgcaggcttctgcctgtcctattttgtgtgtatgtgagagagaaagagagagagagataaaaacacagtataaagttaaatttagaaaactttgtgagtacagtgcagtacacttaaccaaattgaataaactgttatccttcaagtctataccccagaactacaaggatagatgcagatactgaacatgcaaaatgagaccttaatgatttggtttggtttggtttggtttggtttggtttggtttggtttggtttggtttggtttggtttggtttggtttggtttggtttggtttggttttttcctgaggctggagggatggctcagtgcttaagagcactcgcttctctttcagaatttcgttctcagcacccacactgcacagctcccaatcacctgtaactccagctcaaggagatctgatgcccccttctggactccacaggcatctacacacatgcagcacaaatactcacaaacgcagtgataacaacacttacatggaaaaataaatctctgtaaactttcctacaggtggagtaacgggtcgcccgtgatattccagaactgggacaaaggaagagaagaaagagtggatagccagagaaagcgatgtgtcttcatatcttccataacaggtcactgttccttttgatgtttgggtttatactgcaaccacctctagaggttaccagtctcctccatgcggttatttttgttttctgttgatcttgtacagtctcacaagttgtcaggtgtctggatgactgctcatactatgaaattcatgtactcacatgcctgtaaacttacagataggtaagtcctcaagagccaacagaacccgaagggagcctacggacactgttacagacacgcacctctggtccagaggctaagacctggtttcctggcacccatgtggtggctcccaactatctgtaactccagttccagagatcaaatgtcttcttctgacctcctctgggatcaggcacacacgtggtccacatacatccattcaaagcaataaaaataagtatttttggtaaagacaagtatgcatttccctatcaaatatataaaaaaaaatgtttcttgtacccacccaaaacaattaagagttaactaatttggacagatacagtggggaaaaaacgtgccttgtagatgctattctctgtgagacttcagtggggagctatttcttcatacatctctattttcctgtttgtacactgactgacactttaacctctgggacatttacttccatcttccctcacattaaaaagaagaagaagaagaataccctacatttagggctagagagatgactcagcagttaaggtacccaggttcaagtcccagcaccctcatggaagctcacaactgtctgtaactccagttccaggggatctggtaccctcctcatgcagacatacatgcaggcaaacaccagtgcacataaaaataaacagtctttaaataaaacacctatgcccgggtcactgtcccaccatcctcaccatctctggctctgatgaatgcacatcttagaagaaaacctgtctgcaaattggatcccatggtacagtgaagctagagactggcttctgtatgttctaagaacaatgctatctaggctgaatcaagccatattttaaggggaaaaggtagagggagggagagagaaagaaaagtaataaggagaaaaacatattcataactaacttggtcagaaaagaaatgaagaggaaatcctctgtgggcgagcagagttaggagaaagctgtagttaatctgctggctttaccagcaggtgtcacaacagcctgtggaaagggctatttgcaagaagagctgagcattccagtgacaatcacagcccagccccaccttagaagccccagtttttactcctgttctgatacaagaagcttagcctgccttgcacctcggcttctactcaggcaattgcttacgtgccctgacacctctcctctggaactgtagccctcctaagttaaaagatagtttgcagggggctgggaagctggggctctatcttacagaagacaggctcctatgggagccggtctcagttaagggtcaagactgagaaatcttcctttgtgaggagttcctgacttgacctttctgtattagtatgtactcggaagatcttttatccgagtaagataagacatgttttggagttttcaggttggggatgctaagatggactttgccagttttagaaattagattgggtatatccaacctgcattttctgaagatattttataaagtttagagatgttttacaatctttacaaaggacaatcttagaatcatttcccctgtatactgaagctggatacttaaaaactatgaaatcttatttcgtgccccaagtcaattatccgtaggactttaaattaatgctgtttcagttttagcgtttgtttactttagtcaaaagttcttatattcttacattgtaattactcaggtctcaccttgcccaggtcagtgtcactagaaatctctgtaattagtagtttggttcagtttccagacttcaaaaaagaaaaaatgaaaaatcagagcagccatgaaaagcaacccataagaacttgggtggagtcttccttgttcctgagactttctgacctgtctcctcctgcagggctctgggggactgagaactgctctgttcctttgcccagcatctgtaagcgagtgaagatatgggtcatcgagaaggagaagccgccgacacagcctgggacgtgccccaaggggtggctgtattttaactataaggtaaatttcttcttgtgaagtcatctttgtctctctttgttgaacttcaattgaaaagttattaaaagtgagggtagggttttttggtttttggttttgggttttgttttgttttgtttttttaagcaccagttttctgagggacctgagatgtcactatcacatcctaatggttttagaagcttttcctttaggcaaaaaaaaaaaaaaggttttgtgtaaggcagccatgcctccatacctcatctgtagaggcagttttagtgaccatctttcgagtcacaggatatgatgtgtgtgcgtgtctgcagtgcatgggtgtgtacacatgtgtgtctgcatgccagcttatctagatcctgcctacaaataaactatacatgtacaggcccaggctctatcccctcatcttcactgcccagaaccagcaggcctccacctacctgtaaactgatgaactaatgatgtaatttggtcagggtcatcttgagcctcataaaactgacacttggtgcagaattccatttaagagaaaaggcttgccagcagggacactgccatccaggtttatgatttccgatgctgccttcaattaaggcggaggttttttcctccactccttctgttttgtaataaaataactttataggccttggctgggagtgatttaagtaaatcccaaactgggatagtttaactcttagaggattaagaaatgagatggtgtcataattgcgtacactaacatgaaattgctctttgattgtggatggccagttttgagtctaagtggtcacactggctggcgttttcttcagcatcttaatgtcactgttaactgaggcaatgaagtcacctgaattctgtacatatataggtagtgatgtatggctaactgaattttggtgaaatacatgcaccataggattttctgccttaatcattttcagtgtgtggtttgcaggtgctcagtatcattgtgttgtacagtgcatctctgggtcctttttcttcttgcagaaccaaaactctgcattcattaaataataacaacaccctattcttctttcccatcacactgactcctgaagaaatggctccactgttttatttcatgcctctctgagacaggctgtatatgcctcctgtacatgaaatcatgaagtatatttattctttgatgactggctcacttcattcagtatggtgtcattaagtcttgacaatgttataacatgtaacaggattttcccctttttaaggctgggtaatattctatagcatatgtgttgctaaaattctttcccagggtgtaatataaactatatctacccctattcctaaggttcccaaagacacacacacacacacacacacacacacacacacacacacaccagcttcatttccctgtttaaaagttgtattattctacaaaagtcactgaagaaccacttggtttccttacagagtgtaggtgaagggttgcttatgggaaagtctttacctagcagagacaatgacatagccacatggttgggaccatcttcccctacctagtctttccctagcccctcccccaggccacatgcagttagggcagagttgtatacaataggtgtctgaagcggctggatgaactcatagctggatgagagtcttctgacccctctcctcccaatgagaataaacagtcaacagacccagctaggatcatcttttgcaaggggcacagttgcactgaagatggcagctgtctcactcagaagatagtcctatacgatacgtgaccccttgcccacccatctatctgtctatcacgaagacctagtgttgttctcacttggatgattttactaggcagtttcgtaaacatttctcatttaactcaaattttaagatatacaaaattattattcctatttttacatagaagttggaggcagaagccatgtaaaacagcagatacagtagcacacatgtatctaatcccagcagatgcttctacctgggaggttaaggcagggatcaccagaaactcatgggccagtttgtttacatggcagagaacaggagagaccctgtctcaaacaggatggaaagcaaggagtgaaacccaaggtggtcctctgataagacatgtgcatggctcttctacaataacacacaggaacacacacacacacataccatttccctgttttaaaagttgtattggatttatttttcaaagaattgttattattaaaatatcaacacaacccaaagcaatctacagagccaatccaatcttcatcaagattctgctggtattttccacagaaataaaaaaaaaaaaaaagaagaagaagaatgctacaatatgcatcagtgcacacatttccacatcccagttttcgttccctttggagataaacctagaagcacaactgctaagttataggatgctcttgtttagctatttgagaaactgacaaatgggttttcccaacacataaacaacttataattgcatatataagaggaagtttcgttcatatacttttggagagggagatgtttaattaaatctttgtccatgttttaattaagtcatttggtttttttaatgttgaattatagaaattctttctagtgttatgtgtaatgaattcctatcaggtaaatgatctttacctctaatgattataattatgttctcctttataattataatgtcctctgctgcatgcatctctataattttgataaagcccaatgtatcgactttttcctctcttgcttgtgcttttggtctgacacctaagaacgcagcctcaagtcacatgtcacaaatactttcccccacgtcatcttctacatgattttggctcagatttggattcaaattgacttttatttcaatcacatggctgttagtttcctaaggctgttagaacaaggacattctagaattggttgttatagacagatacaaacaactgcctctctcgtctcaaatttttactttaaaacagaatcaaaaggcaagtggttgtatcttgaacttacatcagggagttggaaggagtagacagagaaacagagactaaggtgccctaatcctttatgaggacacacctcaatttctaaggcttttccttagatttcacctctaaaatgtccatcttccctcccagtgtgggcacctgtagagaatgtctttagatgagggtcttgctaaggactgagtaactttagtaaagttccattcataagtgaggcaggttaagaaaccataggggctgcagagatggctcggctgtaaggagtttgtgctaccctgcagacgacccaagttcggttcccagcaccaacatggggcagttcacagctacattaaactctagctcgagggatctgacaccctcttttgacctcctcaggcacttgaactaacctagacatatttttaaaaaaataaatctttaaaaaggaagaatcacaataaccaataataaaataaaatgctgtcctaaaacaaaattaagggaacgcctgctccctgttcctccctctctctctctctctctctctctctctctctctctctctctctcccacgcacagaccatagcgttgttgtcattgctctgcactttctcctctgtgggtatttgaaactgataaagtggaaactacggctaaagggaacagtattcatgggttaaccagatactctagaagctggcgaagaaaggactgttgctgagagaagcagcaagcaccattgggccatttcccccattaactcttaaagctatagaaaagaaagtgggggatacattctgaacaaatctcaatgcattatgggccattaaatcttcttgctggttggtgaactctttcaagggctaatttttattactttaaaaaaactcggctgacaagtcaatcaccttctaagaattttataaaaacgaggtatctgcaagctaggcgtccctttcccgtgtctcataaatcttctccatgtttgatgatacagcttaatgaggtatgcgaagcctgacactgtgtcaccctaggaagggttagtcaacagagccaagagggagctcctctttatcatttttccttctctttttctcatctcctctcctacctctgtatagggtgtgtgtgtgtgtgtgtgtgtgtgtgtgtgtgtgtgtgtgtgtgtatgtgctttgcagcacattttatttcagaccttggttcagtgccagtgtatctatccttcagcagcatctaaggcagagatgggtgagagagtaaggctgcttcagctataggtaattattccattcaacaacagaaggaaaattgagaaaagaccaaattagaaggaaatattatagattctattgtcaaatgttgactaaaaattattttgaaacaaaattttattattcctagcacatttggaatattataaggcctccttaactcacagttatgatcagagatgcataaaacttgatcacattttgcaaatttgtcagaagataaacaagttaaaaccgaggctgccgtccttcctccagctgttcagcctcagttattaacaagactgtttcaaagtgtgttagtaaatatggtctattttagaaaaacacgcctgtggtaacaggaggccatacttccactgtcaaactaataaatgctggcttcggggaacatggaaggcagtgaggagagagagtcttcccgcaaagggtggagaacctgagcctgtaagagtcactggtatttatgaatggttcattagtgactatctgaacacaaggtgaactcacattaaatgataagacttcccaataattagtgtgtgccattctttgggatttgtaattagaagaaagaagcagaataaaaaaggaacagataaaagggtggttgttataaaaggaaacgcctttaaagccaattccgtttctttgtgaagcaaacaagaaaggggtgtgcagcaggagctggaaacccacccctctcttgatcagtaacacaggctacatcagtttctgggctttaatcctaaagggggtgggagaatagaaggcctgaagtccttaaaaacataaacacacacacacacacacacatacacacacacacatcatcatcatcatcatcgtcatcattaggactgagttttggtgctatctacactttgggctggatagttctttgttgtggaaaaaaacagtaggaatacggttgttcacggcagaaactagcagcatccttgcctccaactttatatgtcccctgacaactctttccgaaggaagactaagaatgtccccagactttgttgaaatatccccaagggtaaaaaccgtaccctaagagagctgctgtggtaaatctaaaatgcctgagactatcattgtatcattgattgtagggagttagctgcatgaagagagctgaggcagaaatccagcaggagataagagaggggaggacctgctgcctgtatcagttaaggagagcactggggttgtccccagagtgctgctctcctcaaggaaagaaagtgtgggatctctgtagagaatctatacctactcatctggagacgcactgttcggtgggcacattcatgggtgtgctcagtttaagggcttggcttaagtagaaaagataatgggcccatctctggccattcttggctcaaggtcatagagtagtttgcaaggttaagatacaggatgtggacatttctgggcatgctcagttcagtgtcacagagatggaaaacacaagtactggttcagtgttgtagtgagagagacaagattaatctgtgtgcccaaaagaatgggttatagtacccctgtaggcttagtaatcttgactgaattttcctgtttttaaatgcatgtgtcatgggagtgtatgtacaagtgcttgcgtgggtgtaagtgcacacgagtatatagttggatgtaattgtgtccacagttgtgtggaggaccaaggttgacattggttttcttactcaaatattctccactttatacactgaggcaggatctgactagctctcctggagcgagccccacctccagggattacaagtggagagccctggtgtcacctggcttttaacttgagttctggggacccaaataccaatgattttgtggcaagtgctcttccactgagccatctcaacagccctgtaactgggtgggttgtttttttcttgtttccccaaaaatgtttacagtagaaaaaaaattttaagggaaagatatttaaatgacactttaatagaacagttctgctcaaatgttcctgtctctcttagtagatcaaagttgacgatcatttcacagtctgttctttcatcccatggatggtttttagggattgtctctagtgatgccttttggcagctaaccatctctgcttttatggagtcatggtggttgggcagaggtgacagattaaaaatgaaagaataaagggaggaggacactattctagagtaagacaggagagctagcactcttgtatttgagtttctggatcaactggggttactttgaagttttctccatagctcaatcctgggatcagaccggccaatgactagggctggctatgttctttgaggaggaaattgtaaagagaaatagctagcactttctgaatgggatgtagcctgcatagaatctcccctgacttctatggatcctgtcctgaagtgttagagccttggttgtctttctccccatgacttactccagctttccctagcatgtctgcatttattgagcaaggtgggcacatcgggccaactgtatcattctgattcccgtcctatctcactgtgaggacatccctgtgatgatacagtcacaggctggcagcatggctcagtggataaaaacactttctgcacaaacctgatagtctgaatttgatccctggaccccacattagaaggaaggaactgaccccttagagtggtcctctgaccttcatgtgtgtgacatgatgcagtttctgttaaagtgaccaatctcactgtgagaattcagcctgtatttctgtgttccatttagcatcagtggtgaagttggttcctcggtcatctttatttctctgtcttcttctcacctctcctcttgtttttctgtaacttcctgtgtgctttctattaaacgagcttctagtgaacttaaatcctccaggtcctttcatctctgcttatagatagtctagctaagctactcctttcttccaagttccctactataaagcttgcaggcactgactccttcttaggaagagtgcctttctccactgagtagaagacagtgctgtgacattccacatgacaaacacatctctgcttcttcttcagccctgcttcatgagaatgagacaaatcgctcgccccaaagcagtgtctgtccttgcttcattaatgcctgcagagcaggcagaagacaaatgagttctctgcctaagaaaattatcatttccaagactgaccttcggtgtctttgggaaattgtttgagttctcatagaacagtgcagggataaacagttagtgttgttgttatttgtagtgcttcctggtgacaattcccaaggaccctcgggagctgaagacctggacaggtgctcaggaattctgtgtcgccaagggtgggacgctggtctccatcaaaagtgaattggaacaaggtagagtctgagggttcagccaagccaaaatggcaaccggcattcaagtcttaatcaaaacagcacctcaaacttgcatttacaaatcaacacttaaagcatcatgttgctaagacacaggaaatctcagtttgagcatcagggtttctgctatgacatctgtgagtcagtaggctgcctagaaactgctgcccttggaggtttgaactgaagagaataaggacttaacatgtcctctaaaatggctaaaatagttcctcaggaacactagggtagttgcatgataagctttttaaagatcattttgagttcaacctatacatttcaatttgaaactcaggcaattatacatatctgtttaaatatggtacattaatcctcctttgtttaaaacaatagtaagtaaacactggaagttgttttgctaaataatctgatgaaatatcaggttatccagctcgtttaggtcaatttaaactgaaaccaaaatgaaagacaactcgttacaggaacaaagtacggaactcctataactgatgcataatgacgcttgctgtcatttgaatataatcatttctgtgaacagcatttgctgaccacctgatgacttgtgtggtattattagataattattagataatgcatttctcttttccagcttttattactatgaatctttttggccagaccacgaatgtgtggatagggttacaaagtactaatcatgagaaatgggtaaatgggaagcctctggtgtactctaactggtctccatcggatataataaatgtaagtttcaaatgttattgggggcagggttttctgggattgaacccagggacttctacactttaaccattgtgctgtgacctaagactcttaagttttaaatatttttgacattttaacaagagatcatacctgagacttattgactaaaatttctttctccccacattttgaagctatacatttgtatgacttgactggtcatatgttaatatttaataatatactattataacaatttcatgagtatcacagcacaattatactacacatcatgatgaatatttatcttgaaggctatgaggagactctgggttggtttattagatgtaaataagagaataatggtgttttactttttaaaattctgccctaaataaattttcaatgtgtcaataatgttatatgttaccatgtttttgtaacgtgtttttctttaaagataccaagttataacaccactgaatttcaaaagcatattcctctctgtgccctcatgtcaagtaatcctaatttccattttactggaaaatggtatttcgatgactgtgggaaagaaggctatggatttgtctgtgaaaaaatgcaaggtaagagatcatcagggttttattcctgttatttccaacctttcttccacacctgttgtctaccagctttgctgctaataacaagagttttcttgtcccctgcatttaagtctgttcaaccacaaatccaccgcttcttagggctgtgcccttcaactctgttctcaggactgcagagaccatctggcagatcaccaagtttatgcattaaccctaggaccactaaacagctttcctctgtgttttaggactctgtaccatttccccacactctgatgatgttagcattaacacaaagaaaagcactttcatttgacttatgattctgctccaaaggcaacgtgatgatgtctattgaggaccatcttacgccagacttccaaggaggcacagaaagatactggcgtgagccgttctattccctctctccagtcaaagccaccaaaattcatcatggaaccctgtggccttagcaccctccaaagaccctacttctgaacttcacagccagatgttgtttctacccacttaatacttcatagtgaggattaaattctaccatataacactttacagagtacactgacaccagatctaaacatagactactgtggctacttttacaactcacccagaatactgaaaacagataatagatagatagatagatagatagatagatagatagatagatagatagataaggaactatacttagcttagacctgggctatatagtaaaaccctgactaaaaacaagaacaacaaaagtcataaaaataaacatttcacactcactcctttcttttttttaaagctcctaaaatagtgtttgtggctaaataggatgtatagtgtgtttctagatctagcagataaaactcccttgtggtttctggagtgtaatgacaaagccatatgtgatagctttacctccctgtaacagaatatctgaaataatcaacttataaagagagaaggtgtatattgaccaagcaattttaagggttctggccggtgattaagtagacccactgctctggggctgtagcaaaagcagaaccttgtggagggataggggcagagcaaagccactcatctcaggactggaaggcacaagtatgggaagggaggagtctaagctcccgttattctctttagtgcaacccgcagtgacgtgagaccttctactgggcctcaccccttaaatgtcccgtcggctcagtggcaacactctggggagcacactggatcttaggaggacctttaagatgctaactaaagtgtcagactgtcacaaatatccagagggatgaatgagcagcgtgactgtcctagagtgaccttaaataatagaaatagcaaagagacttcttgctttcactacctgctgtgtctccctgtgcctggcaccatgctttgggtttatgcacattatgccataaaacctttagtaccattccaggaactgggtcaaagtctccctgttgtgtagataaggaactttaatcataaaaacagagcttcagttaactgtagcaattctattcctgtaatgctaaaatatcttctctgattattttcttcatcatttggggacaagcaacgtagacactcctttggtgacattgcagggcagacagggagcaggcctggtgtctggtcacacaagctccactccacctctgtaaatggtcaaatgacttaccctctatgagtctcaatttctacaaagtaacgatgtgaggactatttcatatactcaaatatacataaagtttagcacagttcccagcatgtgtttagcaagtgacagtttttaaaaattattcctgcaaaatattattaaacttgaaatcttgttacaatgaatgccctacatttcccatatagatatatgcttatattgggcttaagccaaaaattgctacattcctgaaagaataaagaaatatgggtataaaaagatgcaaaggccaggggaggctgcttggtgggtgaaagaacttaccgtacaagcgtgaggccccgagtttgaatcgacaggacccatgtaaaagccaggttcatggtgaaagcgtctgtgatcccagagtgaggacagagacaggaagatccctgaagctcacagagcagctgacctgcctaacacagcagaaaagccacacaacagacctcaactcaaataaaggaaagaacctgcattcatgactgtccttagacctccacgtgcatgccatgacacacacaggcttacattcacacacaagtctatgtacacacacatacacacaaacacgcacacacatgcatacacatatgcatgagcacacacacaggggcatggttggtgggtggggagccaagactagacagctggaaacaactcagtttccatagatgtttcttctccagcataagaagttacaaacccacattgctgaaaatgaggtgtgttttgttttgaaacttgaaaggattaattgtgctgtgaggaattccatacagacctgaaatgtgagctgcagatggatgggttttctccgggtctcttagccaggtagagtcaggaatgggctaagtccaggccttcagccattttcatctcagcatgccccttagtaaacccaaaccacttactggttttagttttcagcctagagggacgcaattcactgtagatcggttagggcagaaaaggtttaccttgttttcctggtttagtttttctgaattctgcctgttctatagctataacataatgcaggacataaaagacagatgcatatatattaaagagaacgtaatcatagacacacacacacacatacataagggagacagaggcgggaggtgggagggagagagagagtactaactggaaagagtatggctttgtaaaccccaaagctcctaataatatacctcctccaacgagccacacctcctagtcctcaaatagttccaccaaccagagaccaagcattcaagtgtataagcctccggaggccactgtcattcaaccacactgtcccagtgccctagcatcacacacacttccaagtgtagaacttgaattcatcgcttctggaagcaaaaggctggtcagtgttgatcccatgacaaagatgcatgctaagtttgaaatcctcctctctagtccagacgctacaagtgactttgttgatgttctcgttccagacacccttgaacaccatgtaaacgtgtctgatacgtctgcaatccccagtacgttagaatatggaaacagaacttataagataatccgtggtaatatgacttggtatgcagccggaaagtcctgccggatgcacagagcagaactggccagcattccagatgcgtttcaccaggccttcctcacggttctcctcagcaggctgggacacacccactggattggactctccaccacagacgtaggtgttctcagtccctcccttctgtctacttccttagtaaaacaacgctgaaatcagcatgcaaaaacaactcccagacacaatagtaacattgtaacatttcaataatggtttatgcaaaaaaaacactgggttttggttggttggttgcttggttggttgcttggttttgatattttggtgatggtggtggtggtttgagaatcccaaggctataaaacaaaagtataaatcttttccagataaacatgcccttgcctggtttctaaggaccccaagggtcctttgaaaattctctagcatccctgagtactgactcatttatgcaacgaaatacatctcaaactcaagtaccgtatgtgggtaatttgttagatttccagaatctccattaaaaaaaaaaaaagaaagaaatgattgctgctttgtactcagaaactttattattaattaattcactacctttgaaatacaacacgcagaattctgtttgtgtgagtttgattttttgttttgttttgtttttgcttcttaaaaacaagactattacatacttaaattgctgaaaaataaactctgttccctccacggcctctgggtcttttggaaagaagtgtggaacttgggaggagtgggtactcagttagtgctgggtgatcccagctgcagccttggcaatgaagtggtgcttcaaatcccctctgcagaatggtcagacttttgactggtcggacggcaccaaatcccctttcacctattggaaggatgaggagtcggcctttcttggtgactgcgcttttgctgacaccaacggacgctggcatagcacagcctgcgagtcatttctgcaaggcgccatttgtcacgtagtcactggtaggtacgattctcttcaactccaggaatgggtcctatgttactactgaatgcatgatcgtgctcagcaatgattacgaacacatgtaataaaaagtctcagctctcaggaagcctgtagtctctctggtctatcatataaagacaaatacctgtcatgccaggtgtgtctagaagatgaggggttatcaagaaaagaatgcattgtgtgttctccggatactgccctccccaccacggtctgcggtgtagtcaataatttcttgttgttgtgttttaagaagcatcctatttatttggaggaagacagaaggcttcctgaaggacatgtcagtgtacgcagacggaacttgcagagtggataggagagatgggcaacaacaacacagagacgaatttggaggagagaagcttagataaaggaaggcagagaggagcacaggaaggggagccacacgcaaagctggtgttgagtttgccagcatggcaggttagggtaaaaggacgatgagaccttacataagaaaggcgggccactctcctgtctctctccacacctgccacacattcaccttcccatctcctcttccatccacttatctctctccctttaccttctatgcctttttgttcccccttttaagtgtgcttcaagcatccatgcttggcccttctttcttgtttaacttctttgtgtctgaagggtatatcatgggtattctgtattttaaggctaatgtctgcttactggtgagtacataccatgcttacccttttgagtctggattacctcactcaggatattttccatttccatccatttgtctgtaaaattcatggtatccttgtttttagtaactgaatagcattctattgtgtaaatgaaccacattttctgtgtccattctttggttgaagggcatctgggttgcttccagtttcttcctattatgaataaagctgctttgaacaggaaaaaaaaagaaagagagagagagaaagaaagaaaagaaaagaaagagagagaaagagagagagaaagaaaaaagaaagaaagaaggaaaagaaagaaagaaagaaagaaagaaagaaagaaagaaagaaagaaggaaggaaggaaggaaggaaggaaggaaagaaaggaaagaaagaaagaaagaaagaaagaaagaaagaaagaaagaaagaaagaaagaaagaaagaaagaaggaaggaaagaaagaaaggcgggccacagctttatagagaatctgaactgtgagggtttacgtttaagacaaggctggtagattcttgagtgatgagtagggtggtggtaagctgacaccgttcggacattgactataagccctacaccacactttgcacaatatcctatttacatgaagttcagctggcccaatccctttactgacaatgaaacttaattgagatcactcaacacgttcccaaggatcccactagcgacagtgccctgaccaggggctctgtcctcaccctctgacgtgtttactctgtttccctaactctcttctttgttgcactcctatgctctgagagtttccccctctggtctccttttaaatcgcccatttcataaggttgcattatttacttatattgtgggtactattacctacagcacacatactttgcataattgtagatgaaaacaactcaggattagatatgagcaatacctataggcaggtacacacaagtaggggctttagacatctgtgacacttagccctgcacaggacacatattataccgttagacatccttttctcagcatcgttcagctactgcttcctctctgcagtgcatcttactgatgtcccaactttagaatggcagtagacagccaccctcaccaggcagcactcaaaccgacaaaacacttttatccacccttcatgtttagggaaagagtttgctaacagaaatgcaagaactagggttaaccctagtctgtaaccatcagcatcaaatccagcctttggggtcttctgatgaaaacctcatgtgcacattggttatgcatggcctttcatggaatggaaaataagggttatctcggtctacgagcccagacaccagcctgaaaccatacccgttttttcttcatagaaacaaaggcatttgagcacccagggctgtgctcagaaacatcagttccctggataaaatttaaaggtaactgctacagtttttccacagtcctggacagcaggagttttgaagatgctcatgaattttgcaaaagtgaaggtaattcttctgtggggctaacatacttgcatgtcctctcagcagctcagtaaacagtgtgctttctcgcaggctgattatccagggactttaggggccacgaggactactgaaaaaataaaaaataaaaaataaaaaaactattgaatttgcttattagggggacaactattataggcagttcaagtcccagtgcagactttgaaaacccaagagtgtgcctcggtgtagagctttcctacaaaattcttctgaagccatgcgcgttgtgaaattttaatgttctctaaactggctaatcagtattttaacttttaaatgaaagctttgtacacttttatacttaaatcaaacatcacattgtaggtgggtgtggtgacgtggggcctttaatcctagtcctcaggaggcagggaaagatcggtatgcgcttaagggcaaggtctacatagtgagtttcaagctagccaggggcacatagtgggactttgattttatttgttttgtttttaatcaccttgaatttgtgtgtgtgtgtgtgtgtgtatgatatcaggtgtctttctcaaccacactccattctgtatatttgagaccaagtctctcactgaacctggccagtgagccctactggacccctctgtctctgcctctccacctctgatctttacctcagtcctgaggcggcagccttgggtccttgggtccttgggtttctgcagcaggcactttagtggctcatcatctactcaatcactttttaacaataaaaaccaggagttggggctccagatcatccttagagctcctgcctagcatggcaaggccctggagttccagccccagtagtaggaagggaaaccgtgtgttgagtaaccgaacgattgtttttcaaagccagggcttcaggaatcagggcccagaaacatttctgagtcccctttaccttgcttattggctgcttgtcccttttacaggatctaatctgttggcaatcagggatgcggctgaaaattcatttctcctggaagagcttcttgcgtttgggtcttctgtgcagatggtttggttgaatgctcagtttgataataacagtaagtgccatgggtgcagaggaggcgcaagtaaacacgcagtcctgaaggcctctgggagccccaggatgcctcttgaacacaattgctgtgaaaatatagtgtgaaccctaaagccacacctccaaacaaaacaaacggacaagttaaccttcactgggacactgaagctgctagttccagctctgtccccgggcttagtcatacaaaggcaagacacgttgacctgaaaacaccccactttctcaagcgttcggtataaaccacaacaggatgggggagctgtttcagtgaacagctgtgctttttgaatccttatagacaccagtgtgtataatcggaggcacactattctttatgtaactgattgtcttggtcagggtttctattcctgcacaaacatcatgaccaagaagcaagttggagaggaaagggtttattcagcttacacttccacactgctgttcatcaccaaggaagtcaggactggaactcaagcaggtcaggaagcaggagctgatgcagaggccatggagggatgttccttactggcttgcttcccctgacttgctctgcctgctctcttatagaacccaagactaccagcccagagatggtcccacccacaatgggcctttcccccttgatcactaattgagagaatgccttacagttggatctcatggaggcatttccccaactaaagctcctttctctgtgataactccagctgggtcaagttgacacaaaactagccagtacactgatgttattgaaaagtacttgtaaagaaaagtattttaattggcatagagagtgtgtcacagtggtgcaggatggtgggtatggagaccctcctcgcaaggggtattttaatcctggacattgtttgaatttctagccgatggcgataaccaaaggcaagccaacttgcagttcactttgttgttagttataaattcttttcagacagtgcaacacaccacacacaccacacacacacaccacacacacacacacacacacacacatacttacacacacacacacatacacacacacacacacacacacatacacacacacacacacttacacacgcacacatacttacacacacacacatatcacacatacacacatactttcacacacgcacacacgcacacaccgtattaactatgtatgggctgaattttcccactgaatcacttcccgtataagaatggctttaggaaatgaaccttcttgctatggtgttgatgttagaatttcaagggattttctatacattaattttactttctatgtgaccgcctggctggatacgtatcttttttgatgttttgttcatgaatatactcatggaattaaatgtgcctccttaaatttggaggctgctttaaggactgatcccagtcttagactgttaatcatgcacttcattcataacaagccagcattttttttcccacagacaaaaccttaaggtggtttgacggaacacccacagagcagtccaactggggccttcggaagccagacatggaccacctcaagccacatccgtgtgttgtcctgaggatcccggaaggaatatggcactttaccccatgcgaggacaaaaaggggttcatatgtaaaatggaagcaggtgtgtgaaaggagaaagaatttcttcatattgaccctggttaatgccgacccgccatatcagagagtttttcagatagattctggcaccgtcatcttgctccacatcacacacgtcagaacatctcagctcctctaagatgaagggggggaaatcattaatcatatagatgaaataagacatgcagtttacaccaaaaagagctgtgccatgctaggagaaagtgtagggtcatctttggtcgtaggaaatatcctctgtttatttggtgtatttgttacggagaagtaggtataattctgccttgtgagtagactttgccaagaaggtcatatttgagtccatggtgagcaatacggtttacggcaatagaaattggttttagaacgtgaaaccagaaaattctagccatttgaaaacagcagcggaggctcctcagctagcgtaccatgaggaccattggcgtttatgataatcagactattcctagagtctcgttttggaagaaggaaggttagagtgcctctgggctcctgggtaaggcttcagagaaatgagacgctgggctctgaaggaggaggaggagtgtagagagctggaacaaagaaggacagatatgttaaaccaaaggcccagcattactaaaaagcagccacggagaatgcactagactggagtaccatacacatggtgctgaccaatgaggctggatccagtgcttagctatggagctgagattccgggtggagcaaaggatgccctgtgtgtagggtagacacccacagtgaaatacactcaccagatgcaaaggacagtgccggtgatttaaatgatgtgactgaaaacacagggagaagtaggaagactgacaagacactggcaaagaaagagaaagggctgccagcaggagcacaggatgcttgaaaccccaaagtgcggcaacattgtagcagacaaaaggctaacagcatgcccacgttttccctggcatctaagcatcaagagcaaatcaaaaacaccaccccataatgtccagttttaaagtatggcaacttttcaaggccctggatcagttcaaacatactcatcctatcggtgagaaaagtgcctgtccaaataggctgcatggaagaccagatagatttcttttgggtttgcttgtttttaatgtagcttcctggagtagctcttactcctttgttcagcctatcaaggaacttgctacaaagtccagactgacctcagactcccagaaaccctccttctccagcactcgctctctctctctctctgtctctctctctgtctctctctctgtctctctgtctctgtctctctctctctctccccctccctccctccctccctccctcttttctgttcctagacctgaaattgcagaggttaaatgttaacccttgagatagtcttcttaaatgaaaaatgttcttacagtaaaatgccctaaaacagaaactgtgtcacttcagaatggagagtccatggattcctttccagactcttgggaatcacagatgagaaatgtgctgactgtaaagatgttacatacagacaagcagggcttttactgctgggcaaactctccatctaatcccaacaaaaagatgacttcctgctagtaaggaccatgtcttgcatatatttctgctatgatagttctgagactatatggaaatcttttggctttagtaaattaaaaggaatgagggaagaaagagaaaaaaccacttgtgttatgaacaccaatacttatcaatataaatggctcatgggctagcaatatgtctcagctggtgaaagcacttgctgccaagcctggatccaaacactggaacccacattgtagaaggagagaacccacaagttgtcatgtgacctatacacacataccatggtgcatgtaccatggtataagactgacacctctctctgtctctctgtctctctctgtctctctctctctctcacacacacacacacacacagaggagaatacatgaatgaatgactatcagagctctaataaaacatcattcatatactaggcatggtatatgagcaatagtctgattcttgctttgcttgaatacataacataacttagatgaatttaaagaaatatttgtttattatttgattttaggcatcccagctgtaacggcgcagccagagaaaggtaggtttggaagggaaagaatatttagatatttcttagaatcaatacgatagaaggtaggcatgtgacagtatctgtcctctgtgtttctttgtctttctccaggactaagccacagcatcgttcctgtcacagtaacgctgacgttgataatagccctgggcattttcatgctttgcttctggatatataagcagaaaagtgacatcttccagagactcacggggtctcggggttcttactaccccacactcaacttcagcacagcacatttagaagagaacattctcatttctgatcttgagaagaacaccaatgatgaagaagttagagatgctccagctacagagagcaaaagaggccacaaagggcgtcctatctgcatttccccttaacgagatgccgttatagtgtgaattgcgcctctgttttaattaatcttcaagcactggttttgaatcttaaccaaatcagatgggatttaacgtattcatttcctttaactgtggcccattctgaaaaggcccattattttaaaagacaagaactattaaatagaattctcaggccagtctggtaagcattcagtgtgtaggtacactcgatacattaagagaaagggggcgtgtcctctcactccatatgacaggatggtacttctgccagtcagtgcttgtttgattctaaatcaaccatttttaaatggtgtggtttgggaaaatcctaaattttagacttcaggttctgagctctcaactaatactttgaatgacaaagttatattagatctgattctcaagttaagtgggagaaataccaccttctcctacatatgaagaactcagtaggcaggcactctcaagaacaaccatacagtttaaactgtgccataaaccctcacctgttaattgattaccttgatttaaagatatcttttaggtaagtttaaagaaatgcattgagagtttaatattgtcaaagttcatgggccttacttattaaaaactaaaatctaaaattataaaatactatataacaatcttttgttattgttctgttctgttttgttttcaagacacagcttctttgtataaacagtcctggcggtcctagaattcactttgtatgccagactagcctcaaaccctctgcctcccaagtgctgggattaaaggtgtgtgccaccactacctggcaatatgtaatctaaccagggcttacagaatagatgtaactcaaacttaaagagaaaaaaaagtgaagatctgaattgtgctcccattagaaccaaactaaacaagatgttgaaaaaatactgaataaaacaaccctggagaaggtgttttaaaataaactgtccattctgacc

SEQ ID NO: 32 - DNA, 5569 bp, Mus Musculus
ggcgagttcatctccagggctctgggatggcgtggtcctcaagaagagtggtagcttctcttgcctcctgcagcctagtccagagcaggggacacggttctgattcccgtgggtgtcacctagcgtgcctgatggtgcaatggttagcgatgctgcagctgctctggctgcaacagctgctgctgctggggattcaccagggcatcgcccaagatttgactcacatccaggaaccgtccctcgagtggcgtgataaaggaattttcattatccagagcgagagcctgaagacatgcattcaggcaggtaaatctgtactgaccctggagaactgcaagcagccaaacgagcacatgctgtggaaatgggtttccgacgaccacctctttaatgtgggaggcagtggctgcctaggcctgaacatatctgctctggagcaaccattaaagctctatgaatgtgattccaccctcatttccctgagatggcactgtgacaggaagatgatcgagggcccactccagtacaaggtccaggtgaagtctgacaacacagtggtggcaagaaaacagatccataggtggatcgcctacacgtccagtggtggggacatttgtgagcatcctagcagagatttatatacgttaaaagggaatgcccatgggatgccttgcgtgtttcctttccagttcaaaggtcactggcaccatgactgtatccgagaagggcagaaagagcacctgctgtggtgtgccaccacaagccgatacgaagaagacgagaagtggggattctgcccagatcctacctctatgaaggtgttctgtgatgctacgtggcaaaggaatggcagttcacgcatttgctaccagttcaacctgctttcgtctctgtcttggaaccaggcccattcttcatgcctgatgcaaggaggtgctttgctaagtattgcagatgaagatgaagaagatttcataaggaagcacttgagcaaggtagtcaaggaagtgtggattggtttgaaccagctggatgagaaggctggctggcagtggtctgatggaacaccactcagctacctgaactggagccaagagataactcctgggccatttgttgagcatcactgtggaaccctggaggttgtttcagctgcctggaggagcagggactgcgagtccaccttgccttatatatgcaaacgggatctaaaccacactgcgcagggaatcctggaaaaggactcctggaaataccatgccactcactgtgatcctgactggactcccttcaatcgtaaatgctacaaacttaagaaagacagaaagagctggcttggggctctgcactcttgccaatcgaatgacagcgtgttgatggatgtagcttcgttggcagaggtggagtttcttgtaagcctccttagggatgaaaatgcatcagaaacgtggattggtttgagtagcaataaaatcccagtctcctttgagtggtccagtggctcctctgtcatctttactaactggtaccctctggagcctcgaattcttccaaacagaagacaactgtgtgtctcagccgaggaatctgacggacgctggaaagtgaaagattgtaaagaaagactcttttatatttgtaagaaagcagggcaagtccctgctgatgagcagtccggatgtccagcgggctgggagagacacagcagattttgttacaaaatcgacacagtcctgcgaagctttgaggaggcttcgagtggctattactgctctcctgcgctcctgaccatcaccagccgatttgaacaagcttttattaccagtttgatcagtagtgtggcagaaaaggacagttatttttggattgctcttcaagaccaaaacaatacaggagagtacacttggaagaccgtggggcagagggagccggtgcagtacacatactggaacacgcgtcaacccagcaatcgtggtggctgcgttgttgtacgaggaggaagttcacttggtcgctgggaagtgaaggattgtagcgactttaaggcaatgtctctgtgcaagacaccagtcaaaatctgggagaaaacagagcttgaagagagatggccgtttcacccctgctatatggattgggaatcagccactggtctggccagttgcttcaaggtgtttcatagcgaaaaggtcctgatgaaaagatcgtggagagaagcagaagcattctgtgaggagtttggggctcacctcgcaagctttgcccatatagaggaagaaaatttcgtgaatgagcttctacattcaaaatttaattggacacaggaaaggcagttctggattggatttaatagaaggaacccactgaatgctggttcttgggcgtggtctgacgggtcacctgttgtctcttcatttttagacaatgcttattttgaagaagatgcaaaaaattgtgctgtgtataaggcaaacaaaacattgttgccctcgaactgtgcctccaaacacgagtggatatgcagaattccaagagatgtgagacccaagtttccagactggtaccagtacgatgcgccgtggctcttctatcagaacgccgagtacctcttccacacccacccagcggagtgggccacctttgagtttgtctgcggctggctgcgaagtgacttcctcacaatttattctgctcaggagcaagaattcatccacagcaaaatcaaagggctgacaaagtatggtgtgaagtggtggatcggacttgaagaaggaggagccagagatcaaattcagtggagtaacgggtcgcccgtgatattccagaactgggacaaaggaagagaagaaagagtggatagccagagaaagcgatgtgtcttcatatcttccataacagggctctgggggactgagaactgctctgttcctttgcccagcatctgtaagcgagtgaagatatgggtcatcgagaaggagaagccgccgacacagcctgggacgtgccccaaggggtggctgtattttaactataagtgcttcctggtgacaattcccaaggaccctcgggagctgaagacctggacaggtgctcaggaattctgtgtcgccaagggtgggacgctggtctccatcaaaagtgaattggaacaagcttttattactatgaatctttttggccagaccacgaatgtgtggatagggttacaaagtactaatcatgagaaatgggtaaatgggaagcctctggtgtactctaactggtctccatcggatataataaatataccaagttataacaccactgaatttcaaaagcatattcctctctgtgccctcatgtcaagtaatcctaatttccattttactggaaaatggtatttcgatgactgtgggaaagaaggctatggatttgtctgtgaaaaaatgcaagacacccttgaacaccatgtaaacgtgtctgatacgtctgcaatccccagtacgttagaatatggaaacagaacttataagataatccgtggtaatatgacttggtatgcagccggaaagtcctgccggatgcacagagcagaactggccagcattccagatgcgtttcaccaggccttcctcacggttctcctcagcaggctgggacacacccactggattggactctccaccacagacaatggtcagacttttgactggtcggacggcaccaaatcccctttcacctattggaaggatgaggagtcggcctttcttggtgactgcgcttttgctgacaccaacggacgctggcatagcacagcctgcgagtcatttctgcaaggcgccatttgtcacgtagtcactgaaacaaaggcatttgagcacccagggctgtgctcagaaacatcagttccctggataaaatttaaaggtaactgctacagtttttccacagtcctggacagcaggagttttgaagatgctcatgaattttgcaaaagtgaaggatctaatctgttggcaatcagggatgcggctgaaaattcatttctcctggaagagcttcttgcgtttgggtcttctgtgcagatggtttggttgaatgctcagtttgataataacaacaaaaccttaaggtggtttgacggaacacccacagagcagtccaactggggccttcggaagccagacatggaccacctcaagccacatccgtgtgttgtcctgaggatcccggaaggaatatggcactttaccccatgcgaggacaaaaaggggttcatatgtaaaatggaagcaggcatcccagctgtaacggcgcagccagagaaaggactaagccacagcatcgttcctgtcacagtaacgctgacgttgataatagccctgggcattttcatgctttgcttctggatatataagcagaaaagtgacatcttccagagactcacggggtctcggggttcttactaccccacactcaacttcagcacagcacatttagaagagaacattctcatttctgatcttgagaagaacaccaatgatgaagaagttagagatgctccagctacagagagcaaaagaggccacaaagggcgtcctatctgcatttccccttaacgagatgccgttatagtgtgaattgcgcctctgttttaattaatcttcaagcactggttttgaatcttaaccaaatcagatgggatttaacgtattcatttcctttaactgtggcccattctgaaaaggcccattattttaaaagacaagaactattaaatagaattctcaggccagtctggtaagcattcagtgtgtaggtacactcgatacattaagagaaagggggcgtgtcctctcactccatatgacaggatggtacttctgccagtcagtgcttgtttgattctaaatcaaccatttttaaatggtgtggtttgggaaaatcctaaattttagacttcaggttctgagctctcaactaatactttgaatgacaaagttatattagatctgattctcaagttaagtgggagaaataccaccttctcctacatatgaagaactcagtaggcaggcactctcaagaacaaccatacagtttaaactgtgccataaaccctcacctgttaattgattaccttgatttaaagatatcttttaggtaagtttaaagaaatgcattgagagtttaatattgtcaaagttcatgggccttacttattaaaaactaaaatctaaaattataaaatactatataacaatcttttgttattgttctgttctgttttgttttcaagacacagcttctttgtataaacagtcctggcggtcctagaattcactttgtatgccagactagcctcaaaccctctgcctcccaagtgctgggattaaaggtgtgtgccaccactacctggcaatatgtaatctaaccagggcttacagaatagatgtaactcaaacttaaagagaaaaaaaagtgaagatctgaattgtgctcccattagaaccaaactaaacaagatgttgaaaaaatactgaataaaacaaccctggagaaggtgttttaaaataaactgtccattctgacc

SEQ ID NO: 33 - protein, 1522 aa, Mus Musculus
MAWSSRRVVASLASCSLVQSRGHGSDSRGCHLACLMVQWLAMLQLLWLQQLLLLGIHQGIAQDLTHIQEPSLEWRDKGIFIIQSESLKTCIQAGKSVLTLENCKQPNEHMLWKWVSDDHLFNVGGSGCLGLNISALEQPLKLYECDSTLISLRWHCDRKMIEGPLQYKVQVKSDNTVVARKQIHRWIAYTSSGGDICEHPSRDLYTLKGNAHGMPCVFPFQFKGHWHHDCIREGQKEHLLWCATTSRYEEDEKWGFCPDPTSMKVFCDATWQRNGSSRICYQFNLLSSLSWNQAHSSCLMQGGALLSIADEDEEDFIRKHLSKVVKEVWIGLNQLDEKAGWQWSDGTPLSYLNWSQEITPGPFVEHHCGTLEVVSAAWRSRDCESTLPYICKRDLNHTAQGILEKDSWKYHATHCDPDWTPFNRKCYKLKKDRKSWLGALHSCQSNDSVLMDVASLAEVEFLVSLLRDENASETWIGLSSNKIPVSFEWSSGSSVIFTNWYPLEPRILPNRRQLCVSAEESDGRWKVKDCKERLFYICKKAGQVPADEQSGCPAGWERHSRFCYKIDTVLRSFEEASSGYYCSPALLTITSRFEQAFITSLISSVAEKDSYFWIALQDQNNTGEYTWKTVGQREPVQYTYWNTRQPSNRGGCVVVRGGSSLGRWEVKDCSDFKAMSLCKTPVKIWEKTELEERWPFHPCYMDWESATGLASCFKVFHSEKVLMKRSWREAEAFCEEFGAHLASFAHIEEENFVNELLHSKFNWTQERQFWIGFNRRNPLNAGSWAWSDGSPVVSSFLDNAYFEEDAKNCAVYKANKTLLPSNCASKHEWICRIPRDVRPKFPDWYQYDAPWLFYQNAEYLFHTHPAEWATFEFVCGWLRSDFLTIYSAQEQEFIHSKIKGLTKYGVKWWIGLEEGGARDQIQWSNGSPVIFQNWDKGREERVDSQRKRCVFISSITGLWGTENCSVPLPSICKRVKIWVIEKEKPPTQPGTCPKGWLYFNYKCFLVTIPKDPRELKTWTGAQEFCVAKGGTLVSIKSELEQAFITMNLFGQTTNVWIGLQSTNHEKWVNGKPLVYSNWSPSDIINIPSYNTTEFQKHIPLCALMSSNPNFHFTGKWYFDDCGKEGYGFVCEKMQDTLEHHVNVSDTSAIPSTLEYGNRTYKIIRGNMTWYAAGKSCRMHRAELASIPDAFHQAFLTVLLSRLGHTHWIGLSTTDNGQTFDWSDGTKSPFTYWKDEESAFLGDCAFADTNGRWHSTACESFLQGAICHVVTETKAFEHPGLCSETSVPWIKFKGNCYSFSTVLDSRSFEDAHEFCKSEGSNLLAIRDAAENSFLLEELLAFGSSVQMVWLNAQFDNNNKTLRWFDGTPTEQSNWGLRKPDMDHLKPHPCVVLRIPEGIWHFTPCEDKKGFICKMEAGIPAVTAQPEKGLSHSIVPVTVTLTLIIALGIFMLCFWIYKQKSDIFQRLTGSRGSYYPTLNFSTAHLEENILISDLEKNTNDEEVRDAPATESKRGHKGRPICISP

SEQ ID NO: 34 - DNA, 130414 bp, Homo Sapiens
cccgagtgtcggttcactgtggagacagcggtggcggagtgggtctccagggctctgggctggcaaggcccccggaggggtggggcgcggaggaggctacggatccgcttccgcgcggcggggccgggtgcttgggacgcggctctgggctcccgggataaggggctcccgggacaaggggctcccggagagcccagtggttagcgatgctgctgtcgccgtcgctgctgctgctgctgctgctgggggcgccgcggggctgcgccgagggtgtggcggcggcgcttacccccgagcggctcctggagtggcagggtgagtctcccagggtcggggactggatcggtacgttggggaggggggtcggggtggtcgaaggagaggaagaaggggcgaagctaggggccaagctggcgggcaagggcggccgcgtttgtaggggttcgtgtgtcagcagtcctgagcatggggggagcgggtggtgtcctgcagcctcttgtctaggcccagcaccccacttgcgcggcccggcaccctcctggctcctgcgggggtcgggcggcgggggcgggggggcttggtctcgcaggtaactcctctcggctctggcgcccggagccagcccgggataggagtgtcggagaagtttcaaaacggaaactttctgagagctgcttatttgggacggataaatgatagcaaaaagatggctcagttcgtccccttgcaaagcaagcgctcagggtctgcgtcgccacctaggagtgacccccaagccaggcctccccagtccatcccttccttaaggaaaactttttttgtttgtttgttttttgagacagggtcttgctctgtcgcccaggctgtagtgtaatggcgggatctcggctcactgcagcctccgcctcccggggtcaagcgatcctcccacctcagcctcccgagtagctgggaccacaggtgtgcgcccgcacgcccagcaaaatttttgtatttttggtggagacggagtttcaccatgttgcccaggctggtctccaactcctgggcccaagtgatccgcccacctcgtcctcccaaagttctgggattacaggcctgacccaccgcaccccgcctgaaaacatcaggccaggtgagggagagaagccccagtggctccatgaactgcgtgatctgaagcctttatgccttagtctctctcagtggaaaaacggggttcaattcagcaaacacttattgagcacctactacacatgagactcagaaggttgtgtaaagagagggaggagagatttctggcctgcaggggcccgcatttgagaatgggccacctcaggcagagaagcctgcgcctaagtgcagaagtccatatatgcaagtaggagggggacaggagggagttaaatatgccaggaggagcctccagacagcctccatcctctctgcctttggagataagtttggagagaaggggtaacacaagatgtgatcaatatctgcgttcacattttttcctccacagtagaatatgtctacatttttgaggtagtcttttctagactgtgtttcctaagctccctggaggcttaatcaggggcaggtagaacaagaccattcttattctaaagtgaccaaagtcagagatgctcttaccttcttggtcaattcagaaaattgctcctgtggatgcacatctgatcctgtagtatgtatgattccttcccactaagtttaccatgcagtggttattcctttgcattttaaaatgtgggttttgcctgggcactaggtggtagaacagggcagcagcccacaggacagaagttggactgggccacacagagagtatgtgctggtgatcctccgagtgaagggctaatcccttctatatgtagcagaaccaaatactggcctgagacaaattctcatcagtgccttctttttagtagtcaagggcactctgaaattagagccatctgctagcccttgtacctactaggtgcaatttgcacatctgaaaaggttgacatagttggcatagagattcttcagatatgaaaatgctgctgctgattttccaaggagcacggaggttatgtaccattcctcgcacaggcacaggctctctccctgactccagtcacctgcatgagtagaatttcaagtgtaagctggacaggtttgaagtcaagtttttactgtcaatacaaaatggaaaaacaaaatcttaacattgaaaagaacctgagacattgtctactctagccctctattcttcagatgtggaagttgaggtatggctaccatgtagttagccatgctttggggtgcctcagtttaccgctgtgttcactgtaccacattgactcactttagccacgattgacatccacagagcaactgagagaaaaatgcacactcattttcatttccaatccactaataatggctatgtaataatgcacagcagattatacatacagcattttttatctgaattgtttgatatgtattatttgtagatctgatatgtattacaagcatgccagccttgggaggcagatgatggattgtactgtgatgattttccaatgatttatcaataattcttgatatggtttggctatgcccccacccaaatctcaacttgaattgtatctcccagaattcccacgtgttgtgggagggacccagggggaggtaattgaattatgggagccaatctttcccatgctattctcgtgatagtgaataagtctcacaacctctgatgggtttattaggggtttctgcttttgcttcttccttatctttctcttgccgctgccacgtaagaagtgcctttcgcctcccaccatgattctgaggactccccagccatgttgaactgtgagtccaactaaacctctttttcttcccagtcttgggtatgtctttttcagcagtgtgaaaatggagtaatacaattctgtattcaaaagtcagtagatacagtattatatagtagttaagttctcgggcttcagagctagacgatctgagttcaaatcctgactatgccatttaccatccgtgtgaccctggacaggtattttgccagtcagtagctcagtttcctcatctgtaaaatggagctagtaatagtacacatctaagtgttgtccttttgctgctctctcaccatggcaccctcttcctctggccaatccagacattttgacaggttgacagccccataacaattacttactacggtgcacagcactgtacttggcaggtctgaaactcatctcctcctacctctagctcaggcatccccaacctccaggccacctaccagtttgtggcctgttaggaactgggccacacaacagaaggtgagcaacagtgaacaaaagaggcttcatctgtatttacagctgctccccttccctcacattactgtctgagctccacctcctgtcagaccagtggtggcattagattctcaaaggagcataaaccctattgtgaactgtgcatgtgagagatctaggttgcgagctccttatgataatctaatgcctgatgatctgtcactgtctcccgtcaccccagatgggaccgtctagttgcaggaaaacagactcagggctcccactgattctacattatggtgagctgtataattacttcattatatattacaatgtaataataatagaagtaaagtgcacaataaatgtaatgcacttgagtcatcccaaaaccatcccccaccccaccaccccattggcctgtggaaaatttgtcttctgtgaaaccagtgcctggggcagaaaaggtgggggacctttgctctagctggttattccaaggagcctgattttagtttgttttccctgatcagaatctgagcccttcttctagcaagtgctaagacacactaacttcactcactcaagtactccagatacaaagtggacagcggggagaaagaagaaggggatggagcatcctggtgaaaactgggcatagtcattgctaaaggaaatgatcagggggcaagtaaaagggttttgaagctttgttgagggttgaaaaatgataaatgtgaaatggtcccccactaatatatcgtaggagagtttccttctgtagtgctcagcttcccagagcaggagtggaaagaacctaagtctgtgtcagtgcctggggacactcaggggaggctcttctaaatgaccagtgatcaaaggaggtgagggtgcagatgagtgtgtggtcagtgtgcttgccatcaggtcctatctggggagaagaaagtgaaacagggttgggtgtacggggtgtctctcgacatgctgcgccgacggaaagaggggtaggggctgatggcctcagttgttcattatctgtcaggcaatatgtgctttatctacctgttttagttgggttcatccaaaagcaattcctgagacatgttttccttagggtgcaagtagtttttttttttggaggtgattctagaaagcatggtaagggagtgaggacatgagaccagagagggaagaaagccaccacagaccactggggctcagtttcacaaaggaccctttgaggaactgtatagaactcagtggacccaccaacgggcaggaagctgaagtatttatccaccaactcccgcctcttattgactaaggtcactcctggggcattcaccccctggtgctcctggtctctcccaggcagagagccacagaaagtcagtgggagtgcacgaggactgtctgcaggtgagtgagctccaggttagagggtgtgagaaggaaaccaacagaatctgctacccacctccagattggggaggtaaaaacatgagtaggatatgacactggccccaagaggctgagagtccagggacagatacagaaacataaacaattacaaaacagtgagagaggtcttatgataaccagggatgagcaaagtgctgaaggcatgcagaggaggcactggcctggggagctggaggctcataaaaagacatttgttttcctaaaggataagtaggcagttaccatataggaaaaaggagactgagcattcctgggaacatgtatttcatgtgcaaaggcccaggatcacgtgtcaggcaacagtaaaagttcagtgagctgaaagttcccttctgagctcttttggattcaaggaaagaggcccactgaaggtcactcaggcaaacgtggagttggttgtaatggtcccaggatctcaagggggacccaggacaggttcttcagggcagccaggcctcctgggaaacaggcactggccactgacatgaagcattactttatctgtttctctctgtctctggggctctatggtggttcctgcttggttgttctttctgttgactgtttctttggctttgactagcaggactttcctctgtagctcccttagcttcctgggaagagtcccttaatttcctaggagaggggtctggttacattcttcacagcatgctagccagttcctgtgctctgccctcaagtcgaaggccttcccctggctaattggccatggtagaggcaggaggtggacacagggatggatgctgcttcatccagggctgtggatggtatagaccaccagagtagggtcccaggcaaaacaagaagcagtgacatgtctatagttggaagcatgagagagatgaggaagagtttggttggaggcaccctgcttctggaaaaagtctggctgagtgaattgggtactgctgagaagggccctgtgggtttgcacaaaggggaaccagattgcatgtttaagtttagaagtgccatgttcagtctgggacttgaagagggtctcctatcaccttgaagagggtaattctggaaggcagcaaagaaaccgtctggatagttaaagctgagctaagtcagtcccaataggaagattgaggagcagaaagtttgggttcaagaaacagggtttaaaaagaggaaaatatatatttaaaaacaacaacaaaagaaaacagttagtgaaagttagatgagggaagattgcagaataggagaggtagtggttatagagtgcaaaatccaagttttggagatggacctattcttggtagtgaccagatccaagctgtgtttgtgggagtggtcaccaaagtgaagaagaggcaaaagaaggtcctcacagcagaggaggtcagggagcccaatgtccagagcaaagctaaagtcgagtagagtttgggactcttttgtcagcaaaccacaataagaaatacattttacatcacaacccacagcatataggtctacatatgtataactgaaacaatgtttcattttttaaaaaatacccttacctaatatgacatgctgctacatttccccctgttccattctgtttcgttttgtctcgctggtcataacacattcagttgatttcaagaccataaatgggccacaacctgcagtggggaaagcatcgagtcagagtgttgggtcatctgtatggaagctaaagtggctttggggtgtggagaatagcggggagtctgctggtatcaaagccatggtgaatggggggaagaatggttcagggcagagggccccagtggcgaggaaggggggtagctgccaccttctgaaagagggcgatgagagccactacctggaggcggcagtggggagaagctgtagccctgagatttcctgcatagcttctgtttctaatacaaaggtaaaaatgcccctctactgcttctagtattttctaacagctggggagtcgttactctttgttgttttatttacatcgacacattgtctcctcaccaaaacaggtaggcaacattaatacatacccttcttttacagatgaagaagggttaagtaacttgtgcccacaggagcttgcagcatggggattcgaaccaagcactctgcactaatgcaaaggatccctgaatagccttgtgaccccatggtgtggttcattctgtatcctgctgcatgacagaagcatgcgatttggtttcacagcaggaagaataggaggccagcctcttgttctctgcaactcctccttttccaaacccctccttccacatgtgggagtgatattttcctaaagcagaaatgtgcaaagctactgatttatgtattgttctaggcaattctgatgtccctaggcaatgagccattctactaatctggaaacggaatttcagtaaaagcgtgatcggatagtggtttagctgcccttcctggccctgaatcatgccagccttcttgactccgtttctcccatttctgtttgtcatccctcgcatttcttccccttcatacttttctcatcctaccttctctgcctggctcctttcctggcaagcctttgtgagtcagcatagatgtccagtttttctggtcctatttactctttcttgttaagcctctaactcttttcctattgttggttgtcacagtaactgatgccacacaatgcaggttccaagcccatcacaggaaagatggggccacacagatagcttagttgtccctgcagctccccttctttgacctaacaatctgcttatttatatcaagttttctgaagaaacggtccccttgtgttgcctcttctgaactcaatcctaatgctgcaaatcctcatgtaatctatcaaagtaattgatttaagacatttataaacccttccctccatttttttttagaaattatccttgagagccttttggagatgttccaacacatagctaggagcataaattatattttgaattgatcaaagcaaaaagaaatattattgttcataaaataaacaaaagaacaccatataaacactatattaagtcatttagggaaaaacattttataaagccactcaagaaaattagaaaattatgattagaatatctgtaacttgggttctgtgacacagagctaaacaagacagaaaagtcatagccacttggctttttaatttatgatactttttagacaactacagttccaaagaaatatggaaataaaatagtgttaccacttctagcttttggtattctgctcttgagaacttttcaatcatgaaaatataaacaggaaactcaaagtaattatttaactatacacattttttcattttgctgctctttggcaccattcatattcaaagttaagattggcttttatttttattaatatttataaagtgatcatcatgactgagataatccctatcaaggccttgtgaggccagcactattatttttttctttttattataaaatttaaactttttgtaaagaaggggtcttgctatgttgctcaggctggtctcaaactcctggtctcaagctgtcctccagccccggcctcccaaagtgctgggattacaggtgtgaactacacacccagccccagcattactattaaacccattgtgcagatgggaaaaccaaggcagatactcttctggttttaagcagttctgccctgaaagaagtgctcggtagtttgccaaggtcttttttacataatgttaatcttgttcaaatgcaaacaaggagagcttcatggggatgtaaccagtgcagttgcacagggccctatactcagaagggccttccttccacttagggtttaaagctccatggtttggggtcttgggattcataatcatttctatctttgaatttgtgtgctgcgcatgatgtccaatggaacaatggaacttgagccagaggtttggagcctctgttcaattctgcctggtgtcccctgtctacctcccgggacgggttctcagctgcctcctcccaactcctgccctacaattgatgctgcctgctgcacacagtggcaaccaggttgcattgaagttgggggactggaggcctgggccctgggagtggatgccttgtagcatttcggggcagtgcaaggcagtatttgtcaccactgtactgatatcacttctgtgggttctgcgagggctgagtgggaacctctcacatatcctcaatccaggtactgtattctaagcacgttatagctcagaggttgcaatctcctgtgggcctgagggaaagggacattgacttgacttccccatgtccagccaaaaccacgtattttcattgcaccctggaccctgcaaatgatgtagacagcctgaataagaatgatagggatggttatgatctgaattgttccccccccccccaccaaattcgtataaaaatgagactttacttggagatagggtcttcacagaggtaaacaagttaaaatgaggcagttagggtagccctagtctattatgactggtatactcataagaaggggaaacttggacacagaaatatgcatagagagatgatgtgaagagacacagggagaagatggtcctctaggggccaaggagagaatccaggaatccatccttccctcatagcccttggaaggaaccatccctgccacactgtaatctcacgcttccagcctccagaattatgagaaaagaaatttctgtcattgaagccactcagtttgtggtattttgttatggcaaccctagtagcaaaccgatacagggactaacactctatctaccactaaaagttgtttgtttgtttgtttttttgtttgttttttaacatttctaccttgcactttagtaaatgatttttcttttaatgggcatactcccaaggcggctaagatggatagctcattgtaagcacttttgttttcagtaatgccatatcatttccggagttgttttggttgatgatggagttgttttctggttttgttggtttttgtgacccagtctttgaatcatttccccctgggctttaatatgcaggcatttgtgagggcatcttaacagtgttctgtctttttgtccttgccctaacttgcactttgtaatgaggcacccttttgactgagatggtatattttcaacagagtcaataagataatcacagagctgttgtgaataatgatttttataccagcaatgtttgttaagtactttccagttaaataaaggcaaaacaatgggagaatagactaaaagctaaaaggaagaaaaatgttttcaactcagtttaaaaattcattggtaagatacagaggtctagcaaagaatcacggaagagagattttctgccagggtcagcaactgctaaatgaggacagagcaggaggacagaggagggaacgggaatggccagggagtggcaaggacagtctgaaagggttaacccctcctggcacaggggttggtaacagacaatttgaagcctcacagaactgcagtccggtggcactgattatgctgggtttcatttttccctcatgtgagaaagactattgtgtgcctcatgaaacttggagaggcaattaggtgagattagagagaaaatggaagagaacatgtaaaaagatttagcaagagcggtccacggccctgtggagatggtgattatctaggttcagaagctgtaggagaataaagaaggctaagagttaaggacaatgctaggacagggaaagagaagaaagttctgagacaggacaaagaggttttttaaaaaatgtacttgggtaactttttagttgattaatagaaggcaactgacaggaactcaaaagtttcagaataagagacacatgaaaactcagatgatttcagataaaatgcacatttccatgcagagagagaggtaggaagggctggcccacttttcactttcttccgtggatctcttctttgaagaaccatgcacatgctgcttgctgcaagcatgagaaattcctcacttattggtttgaaaggtcatattaagaatacagattttctgcatcactcggccatgaataggacttgattcagcagcttacagtattccttcctgctacagagtaatcttaggaacgtaatcagctctgaatccattgttcactagatggaacagataaagacaaacccaaatttgtgaagctggaaaaggtcagtacatctcaagagagaagctgctcacctccagattggttacagaggagagatgccctccccatttccttctggactgcatccctgctgaaacctaataatgtcagaacagcaaggaaatggacagagtcaagacaggctgccgggcaggaagggcttgagcccagcactagctctgtgggtagatggaatagaagcaatttcaaacctatggactggggtaggagattgaaattgggttgcagcctgcatgctgtggctttctaatagcttgtcttaagcattgcacttgatgtgaaccatgcactggaacttttccttccagttcccttaatggagcagcacagagactgactttatgtgtatagttggattaggtgaacaccttcatggtgtaatttattgaataccagaaagtcctttgtttgcctaaaatgccaccattaaaattgttgttttattgtttctttaaagtgttttttgttaaaaatgcggaaacttcacaaaggcttaacagtacaaatcttatcttactcactttaacacttcaaaccttcactcagctagttctaagagaagagctgtctaaagctaaagggaacactaaaggcaagtagaggtgatcagaaggggtgcagatggtcaagtgcagaggcctcaggagaaacttcctctaggtacctccagtctgctgttcacacagacagatcaaactgtaataatggccccaggctttagactccaacctcatggcacccccttttgcttatatctcctatgtcaaaatatattttggcattagggtataatttctttctgtgcatttcagggattcccagggagaatgtgacttccttgcaggcaaacactatgacatatatatccttctgtctgcagggttcctaaaccatgccacatcaagcagttgatagatctttgttgtctgaaatttcaagtcacctacttcaaaatgtttggcaacaatctatagcagtttattttcttctaagttataaatgaatgcatgtaaataaagctacacctggactgaatatagtagatagatataaaacttctaagacaaaaatggatttggaaaaaaaaaagtgaaagagtggttcagttaaataatctttacagttccatccagctctgaagttcacggttcagggtttatgggtgaagtgagtctcctctgccacacccgtcttccttccagcactgccctgctttgtcctccctagaaagtgggcaagtacatgtgtgtgcacactccccgctcagagtctggtgacactgaggggtcttgtccacctcacatgtgacatcagttgaagagccagttcagggtcttaaatttgggtttattttctttctcttatttgttatcacttggttttttaaatcttttaaaataattgtttattttattttgttttaagttctgggatgcacgtgcaggatgtgcaggtttgttgcatagggaaatgtgtgccatggtggtttcctgcacctgtcatcccatcatctaggtattaagcccacatgcattagctctttatcctgatgctttcccttcccctgcccctgccacaggcctcagtgtgtgttgtttccctccctgtgtccatgtgctctcattgttcatctcccacttgtaagtgttatcacttgtttttaagaacttattttatttatttgttgttttttgtttgtttgttttgagacacaatctcgctctgtcccccaggctggagtgcagtggcatgatcttggctcactgcagcctccacctcctgggttcaagtgattcttgtgcctcagcttcccgagtagctgggaatacaggcacgcaccaccacgcccagctaatttttgtatccttagtagagacctcaagtgattcgcctgccttagcctcccaaagtgctgggattacaggtgtgagccaccacgccccaccattaagggcttattttaaatgcaattataatgttttctttggaactgatggaactcccttcttttcattagctaggcaaattcccatgattccagaacaaatatatacagtttcaaagaacagatatttaggcaaataatttctctctatctctagcatcttacccagtgtctatgaagtagctggcatccaatgaaagctagttgaatgaatgaatgttccatatgcagtcataaaggtaataacctaaacttcggtttaaaagttgatcaatgaaacattctcctcccgctccttagaagagtacacgttatcttatggggccaaagagtggatctgaaatggtctcctcctaaaggaactcagaagtagaaagtagaaccactgtcttccatggattttatttaaaaaaaaaaggatagaaattagcttataagtttcttctggccgggcgcggtggctcacgcctgtaatcccagcactttgggaggccgaggcgggcggatcacgaggtcaggagatcgagaccatcccggctagaacggtgaaaccccgtctctactaaaaatacaaaaaaattagccgggcgtagtggcgggcgcctgtagtcccagctacttgggaggctgaggcaggagaatggcgtgaacccgggaggcggagcttgcagtgagccgagatcccgccactgcactccagcctgggtgacagagcgagactctgtctcaaaaaaaaaaaaaaaaaaaatgtttcttctaataaatgaatcctttttctcctcctaaacttataattatgaagggaagtataataacattttcctgcaaagagatttagtaattctggcagtacttcattaatcacttaatcagtgttcaagcagaactgatgtccttgacatgtataatcaatcttgattcctcccacatttgattttcatcttttaaaaaatccaacaactatgcacactaaggattggtggcttattttcacattatagttttgttagagacattatgtgcatataataacaatcagaatattgatacctatattaagtctcctcacagtctatttgaaagtaattcttttcagtgaatttatggagattaacagtgctaggatcatattctattataacttaatggaaaaatgggctcaagtcattttttaacttagtatatttggaggcagcatgttgattattattggtgaaccagagctacttgcctatggcacattctgaagaacttttctaaagctatttcctaaaggcagctggtgtggaaatataagtagcaccccaaaattaagcagcaatggattaggtgtgtctaatatgttctgctttggaaaggtatttttatgattgctggtgtgactacagaagttccaatttctgccactctttttctcttaacatttattaatttggaagtttaaaagcattattggccaggcatggtggctcacacctgtagtcccagcactttgggaggccaaggtgggaggattgcttgagcccaggagtttgagaccatcctgggcaatatattgagatcctgtctctaccaaaaacaaacaaacaaacaattagccaggcatggtggtacacacctgtaatcccagctactcaggaggctgagatgggaggatcagttgagcctgggaggccgaggcctcagtgagccatgacagtgccactgcactccagcctgggtgacagagcaagaccttgtttcaaactcaccgccccacagaatatttattcaccccaaatgttaggtttgtaattttcatgtctatttattcacagaccagccattcccgcatctacacactgcttgtcaacaccatgtatttttctctttcgtattaaaaaacctacagtgtagactttacaggtgggtaatgcagaaaatcaacagatgaaggctcttaattcatcattgcacacatatttgaacaaaggaggcaaatattttgttatctggttgtttggagagtatttttcctccataaaagatgatagcgtggtgtctcaggattgtttaaaactaaaatgtctgcacccactgtgtgctgcagaaactgcagtaaaaataagcttttgtgctaacagtgtaagaagagaagcctttgagggatgatgagattagcactctgtaggttcaaccaggtctgcagctggatctatagaccaagaatcaggaagtcagaggaataaagtaataatgatagctcccatttcctaaggcttttcatggtagtatgtggtgtgcttttcatgggttactcaatggaatatccttaacatccctaagaggtcagtaccatacatattcccagttcaaggaggaaagatgaggctcactgagatggagcaatctgcccaaagttacacagcaggtctgtgacagctccacgtgactccagagctctcaaccactagccaggtcgtctacacacctatctgaggtgtataaactgaggcacagtcagtacgttgcagagcttataatacatttgaacatatatattaggtagaagctgaactacaaaaccattatagtaaaataattatcctttaatgaaaaattaatgaactctaggttagctagaaagtgattagtaggttacaacagaaattaaggtaaacattctacccaggcatgaaaaagtgaaaaggagagttggacagaaggttaattatcggactccatatcacattgacgagaggtggatttgattttgaatcactattactaataaccatgcagacaaggccctcattaggaaaacaaatttcctgatctaaatgaaatctccctaaaaccattcattttccccaccccaccccctctcttttgctcttatgtatggtgatcaaagcaattctctgacaactaattcaactcctcaaatctatggctataggtaaggtcatcaactattagatgaggtataccatttattaatacattgacaatctttttgaaacagtatcttaagtgattttggttactgtaaatcagttctcctcaggctgattaactttggagaaaccaaaagaacgtttaccagaatgaagcattgttccctcgtggatccatgaggaggcccgtcctgcactgtcccaaacctctccaaagcctctgcctgtacctgttctgccctccattacatgacccgccctaaaccccagacattggagggaaccctatcttgtcccttcagagttttgaagaatagacaggaagtaaaatagaagaggggaacctagctactgggagaacaaaagagcgcctgggcctcaccagacatgaactgaggtgacttaagcagccaaaggctgaagcagcagcagccggtgtgtttcatcaacagcaagcactgactgaatttccaccatgtgcccagcacactccatacttagaccaaagaaatgagactttgtttccatcttcaaaaagcctgtgagaaaacaagttcataactgttgagtactaggtgccttccaggcccgcaacttgggttaagtcaggtagcaggctggcagctaacatgtattccccagctgggtcccacagcttttccacgggaaactcacccaaatcccttcttccagctccggggaggagagcttaggggcatatcacaaaacacctgctttctccgcctgtccatgtggcctctggtttctgccaccgtaatggtggtccgtcacctctcgtgtttcaaggtgtggtgccatagctagtggcctgggcatctacctgcttctgcctgccccacccagcaagccatctcctactaagagtctatccccatatagcaagaggtccccacctccacccttgtactcctgagaaacattgtattctgaccagtattgaatcccgtatcagatcacaaagcagcatttcactgatagcctttcggttttctataggaacttgatggtagagagtttcattcagtggctcttgattcagcagctgtgttcctaacattcaggcacttgtctgagaaagacagtgttgtcatatccattggcacccagtgtccctccccgggagccctgagtattattaccaatccctctctctaaccaattgtgtgagcacaccttctctgtcagtaacagacctgagtggattggcaggtaacccttgttcccatatggccaattaggtcttagatcagagctctcccattagctccagtaagaccttttatgcttcccaagaaactcctctgttttatgcaaatacagcccttcaggtggaccctgcccaacaactccagatctgtgggaaatggctggcaactgtcgcatatcgcacttagatatgcacactgagatcctcatgacgctagttaattatatatgaaaatttcatgccacatctttgatttttgtttcagataaaggaatatttgttatccaaagtgagagtctcaagaaatgcattcaagcaggtaaatcggttctgaccctggagaactgcaagcaagcaaacaagcacatgctgtggaaatgggtttcaaaccatggcctctttaacataggaggcagtggttgcctgggcctgaatttctccgccccagagcagccattaagcttatatgaatgtgactccaccctcgtttccttacggtggcgctgtaacaggaagatgatcacaggcccgctgcagtactctgtccaggtggcgcatgacaacacagtggtggcctcacggaagtatattcataagtggatttcttatgggtcaggtggtggagacatttgtgaatatctacacaaaggtaaaaataatttaaagaagcactcagggaatggtgtttttttaaggtttgcctataagtaaagatttgtaaagcattacgtgaaagaagtacacgaagcctggaccctcaagggacttctgctaaatacattttagttgcttccttgcttatggtaaaagggttatgagagtctcagaatggacatactacattctgctaaagaagcagaacttctcagaatttaaaggtattgggaggaaaaacatttaactgactctgggaatcaatggaagggagcagaaagaataagcagacaggagggagagagaaaaggacggtggaaggaaaagatctttgaagacttttgtcatgacaaatataataatctctcctcccctgccgccatttctcttattgtaaaaactcatccccacctatggaggtatgtgtccaggacacctccaatgcctcctgatgctggctggcattcatgtgattaatcatgttacaagtcacttgaagagaaatgacagactattgtcgggggttatttggtgtgtgccaagcatggttggtggggaagcatggtttagaggggaatttcattttctatggttatttttgtcatttctaaacagaaaaaaaaaagaaagttacatagttaaattcaaatctcaaacctgtccctcagcgttttgtttggtagctcactctatccatccatccatctatctatccatccatccatccatccattcatcccgcatttttgtatagcactgctaacaaatccaccccacattcatcaggcactggactaggcacctggtttacaaaggtccacaggacaggtggagcccctaccctcgtgctgctctgtagaattatgctttcacaagagcatatgctcctaagaattctgtacggtcctgggaagcagagcaaggaactcctaaagaagaaatgattaaaaagagacagagccaagggccaggcattttcaggactcactaaaataaagcaagtgctgcaaaccagcactctgaataatctacagttctgaagaggaacttgatattttgctttatgttaactttttagccacatacccacactcatggtgcatgcaggggaagattctggggaacatatgctttggagtagaaggaaggggactgaaagaaaagggcatgtcctgaaatacctacggttcctaaatagccctaactgctaaggctggtgactggtgacatgtcatgagctcaggtcagcccctgccaattgtgggaaagaggtggggctctccactgctggtccttttgccccaggacataccattggcagccccagttgagtcatgaaaagtttttgttgattcctgattaaggccaagaatggccgagtattgcaataccctgagaaggcagccagcaggccacgtctgcatggtcgacttgctctagaccactgagaagccacccagccagctgtctcgcttcaccctctccctatgtcagctgtttgcccctttgcaaacagggcatcagtggttctttaaaaatgtaaatctgatcctgtcactttcccattcaaaacccgcaagagacttgcccccaccctcagggtagaggccaaagcccgcagtatggcggggagacagctctatgtgcactgacactctagtacgtccctggctccctacccagagggcctccttcctcttcttcattcaccccctcacttgttcttgtctcaggttctttttacttgctgttccttctgctggatcacctcttttctaaagacctgcactctcaggtcacccagttcctattcagagaggtctttcactgcccatcctgtccaaagtagtgccctgtgcccctccaccccatctctccctctctctcactttctctctctctctctctctccctctgtctcacacatacacacacacacacacacacacacacacgcacacacacaccccactctgtcttctcatcctatttatttttcatcatggcaccgctacctgcaatgatactgtatgtttacttgtatatttgctttctctttctctctccttgatagaagttccacataaaggaacttttgctggtttgttcactgttgtatccccagtactgagtacattaaatgttcaataaatatttattgaatgaataaattaataaatgcctatgaatctattgagctttagatgctaatggctgatgtatttggcgactggaaggtattatgaagttaaatctccattaaagtttctttctcatccatccacaaatatgaatgttactgtgacagctcaccatagtaagtaaacaagtagataaatgcataagcaaaccatgtatcagcacttcctctgagcccagcactcagtctcacacctctactgacaggagacagtgaggacctgagggctcactctgctgtagtgagtatctgccccaagagggtttcagtccataaaaaatgctttcgatatatagcagtttccaaagataaagctgacatcatacttatctgactttgtacatttctttctcctagatttgcatacaatcaaagggaacacccacgggatgccgtgtatgtttcccttccagtataaccatcagtggcatcatgaatgtacccgtgaaggtcgggaagatgacttactgtggtgtgccacgacaagccgttatgaaagagatgaaaagtggggattttgccctgatcccagtaagaataaattttgtcttctctatatgtcatgaatgaatcaaagatgattagaaagttatctgtatctaaacaaaagcactgggattgatatattgaagtctgaataagaaccctgatgctattaacacagattttgatttggggtttgtttttgccttgaaaagacaattctaatatatattctttttgccgtacattcaagagatgttaattagccattcttcattaagctcagtgcataatgatgttttaaccagaatcaaattataaatactctgcgatctcattgatcccagcttcttggctggatacttcaaaacaaacctgattgcatataaagcccagttagcctttcaatccactatctcttatgagctgctttaatttctccacatccaggctgctgcttgtctcgcccattgtcaagcccaggcaccagctggccccttgatgatctttctaaaatcgcaattgccctcattatttcttgacagtggattctcgtcttgactccctttcctactatttaccttctggctataacctcattttttttcttttcttaacttgattttcaaagttcaatggcagtggcaatgttctaacttctttttttcagttagtgccttattatttcattttatttttatttagctaaaaagtttccaattgttaccaagtattagagaatgtttatatatgcctcctactttctatattcaatttcctttcccttggtttctgtgagtcagagtacagcttttacagtcttcatctcccatgcctgcctcccctccacatatataaaatgcaacaaataaatttgaagcaaaagcaagttgaagagattaaccccaaagaatctgacttataaagtatctgtagaattgttttctaatccaagagctagtatggcttagcaaataagaaagagtataagctttgaaataatcacacaggccaagattggagtcctgcttcctcccaacaatgaaattttgggaagctctctccatctatctgagtctcagtttcctcagacataaaatgtaggtaatagcagtacctattaggattattgtgcaattcaattagatgaggcattcaaggcacttttcataatatctggcacacagtaagtactcacaagggttaaccattgcagccagaagcagcagcaacaatagcagcagcagcatcaaacccaatttatattttcagcatacacttctgaatccatgatttctcctctctgctgtaagtcaacaagcactaagctatgcatagtggtgaatgccaagagttttaggacttaggatcctccctttaaggaacttggcatctagagagaagacaggtttgctgtatgccagaaaatgcaggctgtatttgacacaatgccctagaatcacctgggagatagtttaaatgcatatcctggcccatcttccagagatgcagtgggtgcagtatgtaaaactcaaccatctgcatttttgaaaagtgccccaggtgaccccggtgcagataattcatcatcaagcaataatatggagataattctatgcaatatacatctatatacagggataatatcaacacatttaacagccaatatggtatgggctattggtcaatcgcaatggagaccttagtgtgggggttgggaattccagaggctctctgctgatattaaccccttagctgctacaatgtgggggtggggtgcagggaagcctgggtagtgggggtaatagagaagctcagaacagtggctattcaccaaccagaatgaaagcattttattattttataactgtcagatcaccagccttctctatttgaatctaaatgtatgcatgtaggtgtgtatgcatgtgatctctacaccccttgactcctgaaacagatgtcatattatttttattattgtcatattatttgcatcatctcttctttttccttttccatccccaatagaggtcattattaaaaccaaataaatgaaccaatactaataaagttaacacgtacttcacatggctctaatactagggacttcaaaaaaaaaaactacaatattcttcttaaggttctgaaaccttaagaagtttccactgggaaacttccaatgacagtttcccagtggaagcctgggttcagtggtgctccaggcttttcattccccagaccatctatttgttcagccttgtacagctcagaagcttcctctgcttgacagcctgccagattccagccctcctgccctttaccacaaccagcagagagcatgtttatttgttcagtgccagttttcttcctttcttgttacttttggctcccggtagccaatataactcaaaatgacgtgtcggagattgaaacctgagcaagctgatagctctttccatggggtcaacaagtggataggacagagaagagtgagtggaataaagtaaaggtctgtactgctgtatctcatccttcttatgtgggaaatttttttaaatatctcaatgtaaaatgatgctacatttaaaaaaaaagttgattgtaaatgagcaaaatttaaatgtagtattcataaacacatatacaaatatactagcggtgaaggatgtaataaaacatcttcagcaaaaaggatgacacacaggaatctctctgggtttgtttagaggcaattatgggccattctggactctcttggttgtgtgccttacagagctgcagaatcacacttagttaatttgagatatttttacgataccaacctgtgaaatgatatgattgcccttgaaccttatttttatataattctgatcagttgctcgagtgatataataaagcagatttaggctgggcacagtggctcacacctgtaatcccagcactttgggaggctgaagcgggcagatcacttgaggtcaggagtttgagatcagcatggccaacatggtgaaatcccatctctactaaaaatacaaaattagctgggtgtggtggtaggcacctgtaatcccagctacttaggaggctaaggcagaagaatcgcttgaacccaggagatggaggttgcagtgagccaagatcgcgccactgcactacagcctggtgacagagcaagactctgtcgccgcccgcctgcccccgctcccgccctccacaaaaaagacaaacaagcagattgatacaacaaaggtatggctgctctctcctgagccctcaacatggctcagcaatgctatatgtttctgtcatgcagttctcacaccccacaatgaccctgccaacctctctattctcctctaacttctaaccctaccttccaatctcctttctgattctcattatttgacctcagttcctacctcataatggcaaaaagatccatcagacagacagtttggcaacttcctgctctctcacctttaagcctacctgcatctgtgcccatctttatttcctcccttctatgcgcgaggatgatgttcctcctcctacatgggccaagtctccccacctgggctctggagcgccccatccaaccttctccaacctgtatctcagttgttctcaatgtgtggtccccgttccagcagcgttggaattccctgggagcttgctagaaacgcaaagtagcagtcacaccctagaccatcatatcagaaattctagaagtgcagcccagcaatctgtgttttaacaaacttctaggtgattccagtgcacacccctgggtgcttctttgctgggcccttttccttagcagttagacctgtgcgagtcttgaaataacatcttaaaaatactgcaattctttcatccctatttctgcctcctgaaaacacctctctctctcatcctctaaatagagagaattcgcaaaagaattgtctataccttcttcagggcactgtctcctcttgacttctacaacaatgcatgcctgaccttgacctccatttccacagaccattcatccatttattcatttaacaaatatgtattgaacacctactatgtgccagggacttctctggctcctggggttataaccgtgaatgtgaaatgtgaaagtcatagtgcctgccctgatgaaattcacattcaagtataatacccaaattaatacataattacagtttgtcataagttctaccttaagaaaatacagtattacaagtgagaaaccgaagttaaaattgggagtcatggaaggttttcctgaggaagttgtatttgaactgtagcccaagagatgagtagaagttgtcaaaatggaaagtggggaaatgagatattcacacggagatgcatgatacagacatgtgcaaaggaaggggagagggagtggtcagcatgggatgcaggcaataaagagggtatatggtttaaatagaactaaaaaataataataaaaccaagtaaaagacagcatgcttttgagtcaccaggcacatgctctaaccattccaaacaatgtcagtgataaaatacgcccacctgtccaggctgactgctcctccacccccagccctcagcatgtcactggccagatatctgaaggttttgaggggggaaagaggttattgccatctaagaaagacaatgtggcaagagtacagtgaatgaagaagagagaaacaagacactctgaaagggcagacagagtccatgagtgtcataaaggtaaggacttacctaattctaagtgcaaaagaaagctatcaaaagagttttaagcaggggagtgatgattttaaaaatatatatttaaggattactctggctctattatactgaatggcttggaagggagcaataggcaaatcctggagaccaggtagaaggctagagcaatagtctgggccaggagtagtggtggcttcagttaggtggcagcaaggggattggaaaaatgtggatttattgaagatctaacttgtagataaactgaacaggacctggttgtcaggagcttagctgggctggagacagcagagctgtcaggtgttggagtagctgattaaagcaacaagccaaaaatgaaggtgttaagctgttgatcactcactacaatggtataacaaagagactaaaagaagaattcgccacctcccccgttccatttttccccagggaacagcacagccatcgagggtcagtggatcagcacagatgtggagttcagctcagctcactattgagagaacactaaacaacaacaaaggcttttcagttgtatagattctgggttggggtaaggtgaggggaagagctaggagttgaaaagtactgagcactgagtcagggtggggaaaaagtgtcttcaagattcccctccttcccactccatcccagcctcagcagaggcacctgaagaggaccttggcccaaggcctcacatagaaagagacctaggaatggaaggcacctgcaccagaaatgcaaataacacagagcacgatgggcttgaggggcctgaaccgttaactatgactctctttagaaactgcagtgtgccagctcagcaccaagtctggggtaggggcagctttcccccatgaggcctaccaggtaaagcctttgtaactgcctgtggtcagacctcaagaatcacatataggtttttaaccaggagtaggacttctcactcctaagaacttggaggctaggagaaaaagtgagacattaattcagactccatgtttctgacatgcatagctaagtttatggagatatacatttggaaaagaaaattaaatactattcaggtttgcacatgttacatgtgagtcagttatgtagagatgtggactaggtaggtagatgtaatggtctctatgtatttggaagttataggaaatggacccatgagaacaggttagatagccatgtgtagaaagaatgtatagaatagaaaggaagggggctcagggccaagtcttaaggcctccaacatttaatttgagtagagaagaataaatcagcaagggagactgaaagggggcagccagggaggaataagggtagccaggcatgggaagtcaagaaaagagagtaaatcagcacggagagggaactcagcctgccaagtgctgatgaaggggcttgtttgataaagtctcaaactaacagttgctgaatttggcaacacaggggtcattgatggccttaaacaaggtatacattaatggctagattcagtggatgagactaagtgggaaattagaagaggatgaaacacttcccaagtcattctacgtatgcacttcacttcattaaaaaggaggtgtagtttaggaaggaaaaatcacctatttataacaccatgaaaaagattctggtaatctctcatcacataataggagactcaaagttatatatgacacaattgcttccctggagcccataatttagcaatagaagagatgatataaacacaatcaaagatgtaaagaatataacaataggattttagcccttagattagaatttttcaagaataataaacatacctgagacaccagcctttgattttcagagttctcaagctggggtgacccttcagagttgccccttgttgggatacaggggctaagtataccactacattgaccagtcatggtgtcagctgcccttgggaagggagagtgaaagggcaaagagactcttctgccaaagcagtccttagagagcagcacatcacagtgtctatgacaacattttcattccatttgttacttaaaacttacaaatgagattcctggagggacatgcagcctatcctagagaagcagagaaaggacttgtgtctgccagtacagaagtacaaattcttatacaggctgagtatcgcttatccaaaattcttgggcccaaaagtgttttagatttctgattttaggatatttgcatatacataataaggtttcttgggcacaggacccaagtgtaaacacagacttcatttatgtttcatatatacattatacccatagcctgaaggtaattttatacaatatttaaaataattttgtgcatgaaacaaagtattgaccaaaacccatcacgaggtcaggtgtcgaattttctacttgtggcgtcatgtcagcactaaaaaaattttcaccatgttgcccaggctggtcttgaactcctgggctcaagcaatccacccgcctcagcttcccaaagggctgggattacaggcatgagacaccatacccggcatctttctttctctttttgtagtgatagggtcttgctttgttgaccaggctggtctcgaactcctgacttcaagtgatcctcccgcttcagcctcccaaagtgctagaattacaggcatgagccactgtgactgtcctaaatgattcttatgcatgccaaaactatgaacacacccccgctcccccatcatggtctcagctgtcatggtggatgagtatggctgaactagtgtctcgtaacacgtagtagtatattgtccttctcagggaaggcctaggattttaactgaaaacaatctttaaggattccatctcaatggggaaatttcagccacctgggcaaaatggttactgaaaatttcccttctctttttcctttctttcttttccttcccttcagtgttacttggtgatagccttgtcttctgccttcctttaatcttggatccttctataaacacatgtatcagtcaggaaactctatagacaaccttagatttatatgtgatttaaaacctctggaatgtgtgttgcaaccagacatgaaaataaactttccacatttcccaaggggaccatctaactgttatgagggaggaaaaaaaaccaaacaaaaaagattttattgtcaaataagtttgaagtacactaaattaacagtaagcatgtttctttactacagaacttctcagagccttgaatatgctaatgttcattgtgaatttcccagagaacgctatgtatgcattgtgtccagattttcttggggagcctcttaaagttgtcttactttgggaatcacactttgggaaaggccatcctagacttcagctggttgcctgtcagtcattttcagtcatgctgcagtatggctcacattctctgtattctgacattctctgtctgagtttggtttccggtcattattgtggctacttagttcaccttggagtttgattttaaatgttagcaaaagcacccaaactcagtcttaattttctgttatttcaaaaaaaacttcagacttcagctccacatttcatactttattacatttccttttgagcacactatgcaatcttcggccagtgtcttacaagtggatcttgcttctattcctcttggctgaaagaactttcttaaactatatgtcagtgttcctgtgcttgatgtttatttgaaaacttgtgtttactattgactcatattcctactgtatccttttattttagcattttgtatttagggagaaatgcctttgaaataacatttgtatctactaaaatgaacatttaaagttacaagttttcaatataaagttctaaatgacaaaagaacttagatcttattttcacaaatacttcgcttctacttccttctcttaaaactggttcctattattactctggaaaggatcatagcttcttcattggtgatttcttatatttctttaggtaaatcatgaaagagtttaaccatatcttagcaatggaataacaatgcagattttatcataaagacctaatcaagaatagataaggccctgaagttttagagattgcaagatggaataattccattcagacttaccttagaaatatgttgctgtatagataaaataagacctggttgtttttaatggccattgtttccagcctctgcagaagtaggttgtgatactatttgggagaaggacctcaattcacacatttgctaccagttcaacctgctttcatctctctcttggagtgaggcacattcttcatgccagatgcaaggaggtacgctgttaagtattacagatgaaactgaagaaaatttcataaggggtaagtaggtggatgacgcacattgatattgatacaataaaagatggttgttaactgttttcacatatacaaaaatatattctgacaaaaagttcttaaaaaatatttttctttccataatatggcccaaaactctcacccaaaatttttccatgaaccttgagtgattccatttggcatccagtgatgtctttcttattttctcctccttggagaagagaatttgaggccacagcaagggacccaggagagttgcagttctaacaagtggatcaggaagatttctaaatttaagggctatttgcttgctcttctggagatcttagccattccatttccattaataaatcattaagcattttattaattaaacaaaatcttacatatcattcaccatgtgcaggtacatcataggccttctggtgggtcccaaaaacaaaaccttaaaatttagtgggaaaagcaaaagcacatatatgttaactaacagtatagacaataatatgttaaaagaattgtgccgataaactaagacttatgtttcgcttattgcctaaactctcctcttacttcttctttatagattaaatgtatttgtatgtgtgtacattcacctctttaaaaacttgtggaaacattagaaaatatcacaaaattagtcactttcattaacagtttttgatgccaatgtttttcaaattttattgcatatgtagtccatgtttattttagaataatttgtaaaattcaggtatatagaaagaaaaaccaataaaaaggttcccatagttctgtaatccagagacaactgtgtttctctgcaaaaacatataaatgcatgtgtacatacacagtatatataaaaaatggtattatataaaaacgtggcagcagccaggtgcagtggctcacgccagtaatcccagcactttgggaggccaaggcaggtggatcagttgaggccaagagttcaagaccagcctggccaacatggcgaaatcctctctctactaaaaatacaaaaatttgccggacgtggtggcatgcacccgtagtcccagctactaaggagactgaggcaggagaatcacttgaacctgggaggtggaggatgcggtgagccaagatcatgccattgcactccagcctgggtggcagaacgagccttcatatcaaaatacataaatacataaataaaaaataaaaataaataaaaacatggcagctattgcacagtgatacaagcaagtgatttaaccacctgctcaggttaggagcagggagccacctgcctgggtttgaatcctgcctctaccacttaagtagcagggttactcaagcaagtgatttaaccgctctgtgcctcaatttccccttctaccaagtggaaataataacaatgcaaattcctggtgtggcttacatattttaatacaggtgaaatcatagaaaagtgcctggcacacataacaaacactcagtgtgtgttaaccatttaacaacaactacgtacacagtttggtaatctggttattttatttacctgcatttaatgaacatttgcccgtatctgtaaatatagatctacatcataatttttaatggttacatagtagtataagttagtggtaatatattagagatattgataaaactatttgttttgttatgtatttattagttggtattataaaccatccctgcacaaacctttgtgcatacatccccaattatttctctataagtttgcagaagtgggttcactggatggaaaagtaagcacacttaaaagcttttgtaagttgttaatatcttccagaaggattgtaagaaatgaatgagcaatgtgtgcccaccctaaaagtcagaaattattattgaatttgatttgagtaagtcatagtgcaggaaaacatcaattttcaaaatcattttaagcctgaaatggtttttatataaaagtttacatgccatttatgaattacaattatctatcttaactgccaggatttctcatgagaaggtctggacttattcatcaaatttgaataaccatttaaaaaaataagacatgtcagggactttgatttaactacctcagttctataattagtctttgggaattgtttggaaaaacagaagtctgttcataaagacagaaacctgttccaaccaaggtattttttaatgatgaaaatagtctaatgtttcttgctaattctggtgaacatatactatggtacaaggaattatctaagctgtcatgaatgccgagaaatatccaaaggaatttaaattcgagtttcttattacagtatcgtgggccagcttagtcctaaaggtaaatagatggttttttgtgccttcagacacaggttataaattgcacaattattttttatctgcattattaaaacaattgcacaatgggtattcaaaaaaattctaagataagaataattaacgttttaatattttaactagattttaaaatatcacttggcacttgcctggatgtgaaacgtgaaaatttctccctgccctgtcaatccatttcacttcttatcatcataagacctgctaaacgattcaatcgaatggtgctattgaaaggaataatcaaatagacattagaaagagattccatatgaatgccacagaaacttggaagggtgaaacccgtgtatagtatgctgtttctgtttattgatttctgggagtctcaaaattataaagcacctttttctcttttcttaaatgggttagtttctttgagtttttcacaattgtattgaaatatctagtcactgaggatgctgcagccttgttatatgactacaatgaccttcacaacctgggtaatcatacagtctatcatccaaactgagattcttttgatagtaaaagggactgtgattaataattattctggaaataccagcatgaaccatgagttttccaggaaaatgggggcatacggtcaccctgtttataacccttatccgtcagggtcttaatcttaggcaggacccctgcgtctgactaaaaataaattgggctctgaatcaggtgaattgtaagcgaacaatgctctcctttatagattaaacgagtaaatggcaacatttcaaagcatcacaaaattgccactttcattatgtttctgacactaggttttggtttttttccccccgaaattttgctgcataagtagtacctatttattctggaataatgtttaaaatttaggtgcacaaaaagaaaaactgaggaaaaattcccataattctttaattttgataactatgtctttctgcatgtcaatgcatgtttttattcatagtatctataacaaaaatggtattgcattaaactgcaagttgtagtggactggttaagaggaggggccacagagccagcctgccattaaacttctcccacctcaagctgtggaagcagcctccagtttgcactgcacacagccttaggtcccaacctgctagggatcccccgagacactctggtccctcctgttgagcagacatctcctggtggctgtcacactgtacacccctccctgatctacttcagcacaccgttttacctttgaagatgtgcctctgttcactttctgggactgaccctgcacacctcttcctccaccctattaaacctttaagttcatgagctcactcaagtaagatggcctcaagtatgcaaccatgcacccttgtctagattgacaaccctgaaaggcaacctttctgggtacttgcatgaagcattcacagttgaaaaacagctgtcagtgagcctgctctgtttctcaagatggtgggagcctgctttatcactcagaagcaccacgtgcattctgtgcacctttcccgtcattgactggaattagtttctgactccatgatccaggaataggagaacaagaaagatgtgtaacactggattttttttttgaagctccataattttcatttcagagcacatgagcagtaaaacagtggaggtgtggatgggcctcaatcagctggatgaacacgctggctggcagtggtctgatggaacgccgctcaactatctgaattggagcccaggtacccgcagtgttttctttgccttcgtcacgtggcatcatcttgcacccttacacagcagcatttcccatgcacataggacatgcttttttgagagtagtgtataaacattttttagcctgactgaattcctttaaggcaagcttttccaaacaagaaaatagggaccaggaagataagctttttagccaaagttgcaggaggatttgggtgtaagccaagattccagtctgctgttttaaaaatagctacaaattgcaaaatatctctctactttaagataataaaagtgggtcttttggaatctttgggaaatcatttaattgacatgcctggactgtaactgcaaaatcatagataacatcttataggatttactatatatgacaaatagaaacgctgtcccccgatgctgaaaaccacatttcaatatatattaaactaactgcttttgcttctaatattaaagacactcattgtattttcagaggtaaattttgagccatttgttgaagatcactgtggaacatttagttcatttatgccaagtgcctggaggagtcgggattgtgagtccaccttgccatatatatgtaaaaaatatctaaaccacattgatcatgaaatagttggtaagcgtttttattttaagttgttcttaggtgttgttgacttgtcctctcaatatatgtaaatttctctattttttgctaataattcataatgtaaacttagctaaatctagtttatatttatatgaaaagatgtgtaactagacaatatctgttatgtcaaagggactgtgattttaacaaatgcatttaggtttatactaaaaactgaaataatctgagcatagcaaacattttcttctcttttaaaaaatttgcactgttagtcattctgtattagagaaataagatacatttctttttctattctagttttgagtttattgttcccctagaaattaaacataatttagaaaacaattttatataattatttacttcattgattttctgccacactctgaatctcttattagtaacacaccttcctccctgaaattacatgcagaacttttagatggagttaatacttaaataatatctaatcacagtctagtaccagaagtccaattatttctgtttttcaggtctataacctctttttagtttctctgagaattaatgtcttagctccaaatgtagagataaaagtataaccattttttaaagaatcattacaaaaataattagaaaaaactctagatttaaaataataagctgaattgtcatttttaaatattgtctcttagaattgggttttaactttcattttcctttaaatagctaagcctagaagttttgtagaatatggggtacaagctggggaaagaagaagcaacttgtcatttttttatgtagagatttttccattatttcaggaatttgctgaaattgctaccacctgttattgtccttttccctccctctcttccttctttcatattcctttctccgttccttctcttttcattttttctttctttccttcttatgccatcttgcattccctcctgccacccttctttccttctgttatatttatccttctatctgctaattgaggtcagaagaccagaaatgggagtagttaagttagcttgtttggattatttgctttgcttcaagttcaacacattcttctgtggattgattgaagtcttgcttttgtggcccaggctggagtgcaatggcacgatcttggctcactgcaacctccgcctcctgggttcaagcaattctgcctcagcctctcgagtagctgggattacaggcacctgccaccacgcccggctaatttttgtatttttatagagacggggtttcaccatgttggccaggctggtctcgaactcctgacctgaggcagtccgcccacctcagcctcccaaagtgctgggattacggcgtgagccaccacgcgcagcctaaaattccaagttcaaaaaggatttcatgagtgcttttttaggctgaaaaccattggggtcaatgatatacaaagttctaacactctttggccatgattctaattgctgccagagtcctagaaacaattttaaaagaatgttttgtttcccaaatagcagtgaaatcatatttagtttaactaaattcgttcttaatggaggcacctcgttgtggttaataaaataaggtaaaaatgccatcatcagattggggacagtctcgtgagaaaggaaagccaaaataagcatgtgcatcaccactgccctccaatgtccaaaacatcatggcactgtgttcctgaaagccccacctggagtccatatcagcccagagcaacatcgtggacactcaagacttattttcaaagtgaaacctatttgtcatccccattttaaaggaagtcatcagagttttaggctcttttcagctggggataaatatctaccttacccacatactatgtataaaatccttggaataccatttaaattgtattccataatacttcttttaaatataaaaaggtttcaaaaatgagcagctctgttaaattttatatctagccccaacactctgctttcattgtatgtcctctgtcaagtctctttacttctttggttttgttgttgttgttttacttttttactattttttaaaataaaattgactgtgtatgttcaaagtattcaacatgatgtcataggatacatatatagatagtaaaatggttatcttagtgaaacaaattaacacatccatcatctcacttagttacccatttcccccactgtgacaagagcaactatagtctactcatttatcaaaaatcctgaatacactacattaactatagtcctcatgctgtacagtagaccttcagacttgttcatcctacatatctgctacttgtatcctttttcctacctctgctcattttctctcgttgactcctataacattttatccattcagccattctgtgttttgattagataatttaatccatttgcattcagagtaattattccgataggtaaagacttactactgccatttttttcattgttttctgcttgttttatagattctttgtttcttccttcctctcttattgtttacctttgtgatttggtgatttgtgtgtgtgtgtggtgctaaatttcaattcctttctctttatcagttgtgtatctgctatagttttttttttttttttttttttgctttatggttaccatgtggcttacataaaacatagttataatggactgttttatactgataactgcttaactttagttgcatacaatcactctagatttttaccctacccccaatagttaaaattttgatgtcgctatttacatcttttaatatcgtgcatttcttaatttattgtagctatagttatgttttaccatcttggttatttatttatttacttatttatttatgctttagagacggtgtcttgctctgttgcccaggctggaatatggtggcatgatcatagcttgacctcctgggttcaagtcatcctcccacctcagcctcccaaagtgctgggattacagccatgagccactgtgcccaatctatttttgacaattttgactttaatcttcatagtagagatataaatgatttacagaccaccattacggtatttgaacattctgaatttgactatatatttacctccaaggaagaaggggtactctggaggtttggctccagggaacagggcacggctgtaacttgggaagcagaaccagtatggcacagtggcaactcaagctctaggggatgaagcaccaggcagtggtgactccggaccctggggtggtgggacacagcagtatctcaggctctgtgaggtcaggttcagtagcagcaaggacccaggaatggtggcatatacctgtggtttgtttcctgggggtcaaggagcagcaaaatgatgactcctctccctgggaaggtggggtgcctcagcagttcaggctttgtgggactagtccagttccaggaaggcaaggtgctacagctgtttgtgttggagggcaggatgtcccagccttgccaatgctgtttcccttggatgcagggtaccacatcagccaagccctacaaggcacagctgctctgctcagctcagccaaggcacccattcccccatgagatggggctgcttcagcttaggtgctggggggtatgactgctttgggcagctaaagcactgtttcccctggatttgagagccacttcagctcaggtgcctggggtgtgactgttttgggcagccagggtagggattccctgggaggcagggtgccacttcagcacacacactggggaacatgactactctgggaggccaaggcaccatttctttggaggcagggtgataagccagctcaggctctgaggggcacagcacagcaacaaccaggaagggtagatggagcagctcgtggcaacttggccacaccaggtagagtgagagccccacagcagcttggcatggggatggtgggccacgaggtagaagtggtgcagtggttacaaagcctcaaggatggaggggtgctgtggctactcactactggagcagaacatgacattctagcagtggttcttttttcaacattgtgcagcgcaatagacccatagtccacagagagacagggtgcagcatcagaactttctctgaggcaagcatagtcctgtagactccaggcagctccctcaaatgggcttagtgcctgtgggggctgcaggggtcctcagtggcaagaactgtaggtgaccctggtggtgttggaggctgctagggtccccttgctcttcctttccttacagagagaagtctctcctggctctgagctgcttataacgggggttgggggagatggtgggggtgggggcagcaagggtttctgtgctccgtgttgtttctgctactcccttgatgtgctccagcactctccttcagctgccttcgtgaaaatgtagtcatttattcattgctttggctgttcctgtggcagggatgagatcccaggtgttaccagaaaggggtcctgatccaaaccccaagaaagaattggaggcgaatccataaaaggaaagcaagtttattaggaaagtaaaggaataaagaatggctactccataggcagagcagcagcttgggctgctcagctgattacacttacagttctttctcgattatatgctaaacaaggggtagattattcatgagttttctgggaacggggtatacaattttcggaactgagggttcctcccccttttagaccatgtagggtaacttcctgatgttgccacggcttgtaaactgtcatggcactggtgggagtgtcttttagcatgctaatacattataattagcatataatgagcagcgagggtgaccagaggtcaccttcctcaccgtcttggttttgatgggttttggccagcttctttactgcagcttgttttattagcaagctttcttgatgagactttctgtctcatcctgtaacttagaatgcctgacctcctggaaatgcagctcagtaggtctcagccttattttacccagctcctaaacaagatggagttgctgttgttcaaaggcctctgacacaggtgtctctatcggtcatcttgctgccatccctcctctccttacttctttgtaccttcactagctcatccggaaaatgaaatactgaggttcatttgatcctagatctaaatctagatcatagattagacccttctcaactctgaagatctagaattccatgatatatgtcattttgtatatttctgtttttcacatttttaaagtaatcatattaatggcaatttacataagctgtaataagtaatgttaaaataattgtggaaaatgacattgttttttgttggtttaaaaagaaaaagatgcgtggaaatattatgctacccactgtgagcctggctggaatccctacaatcgtaattgctacaaacttcagaaagaagaaaagacctggcatgaggctctgcgttcttgtcaggctgataacagtgcattaatagacataacctcattagcagaggtggagtttcttgtaaccctccttggagatggtgagtcccagctgcctttggtttaaaaggcataaaatataatgtagtaactacttttattagtggagttgaaaagaaatttaagctatttaaaagtggttattcattgcacatatatttaaagtttctaaatgttattcaggagttcaaatttattggatttttacaaaatacatgttcagaaactttgtaacatcttcatatatgccacatatattagatgatttttaaatttttggaaagtaggaaagttcatttcctaaaacttctaatgaaaaacctaaacctgtaatttagctttatggccactagatagcagtagtgtgttgttaacatgtaatccacataataaagggaaccccttaggcaaataattagatgtaaacaattttagccagtgaacatgggtaatttatttggtgaggtgatgttcagactgttccccatgtataggaattttaggctcctggcttccgcacagcctgagtccctcagagttggcctgctcttcactgtgtcatgtatttgacatagacttatgctgaaaaatactgaaattatttatttcatttttcagttttttaaaaatacaaaaaaatgtccaggatctcctttgatgaccttttcaattgttacattttagtttggagtaaaaacatgcatccttctctgttatttttcctaatcatttgcatttgggattaaagaaccctgtgggctgcttatctcaacaagggcacttacacatctctttcagccacatagggtcctttcctacctaggctgtcaagttttaattacttttgcagcaactccatttcaatgcctttaagaggttttgctccttttttcctatggcagaaaaaagaaaaaggaaaaaaatactttaaaaaataggtttaagaggtacaagtgagtatttcttacatgcatatattgcagtggtgaagtctggcctcttagtggccccatcacctagatggtgaacattgtacccaacaggtgatttttcaaccctcagcctcacctctgctaccttttggaatctccagtgttttttatcctgctctgtatctccatgtgtccccattgtttagctcccacttataagtaagaacacgcagtatttgacattctgagttatttcacttagcagaatcgcctcaagtgctacctgtgtgcgaaagatatgatttcattcttttctatggctgagtagtattccatggtatgtgtatgtgtatatatatattccatattttctttatccaaccctcctctgatggatacttacatgattccatctttgctattgtgaataatgctgtgataaacatatgagtacaggtgtctttttgatataatgatttttttccctttgggtatatacccagtagtgggattgctggattgaaaggtagttctatttttagttctttgagtaatcccagtactgttttccataaatgttgtactaatttacattcccaccaatagtgtataagtgttcctttttttgcatcctcaccaacatctgttggggaaaaaaaaactcctatctttaagctagactatcattaaaagtttgtttgtttcatgcccttttcataatccagtgggccttcctatttttcctttctctaggcagaagcaaaaccagatttttcagatctacttaacatacatacatggttctagcagaaaccagagccccaggaatccaacttgcttaggctttgttgttgcattggctttagctcacattctgcctcacttataaggcctatatcaagcagatctggatattatggggatgtcttagtccattttctattgattatagtagaatacaaagaaactgagtaatttataaataaaagaaatttatttcctacagttatggaggctgggaagttcaaggtcaaagggccacatctggagagggtctccttgctggtggggattctctgcagagtcccatggtggcacagggcatcacatggagagggggctgagtgtgctatctcaggtctctcttcctcctcttataaagccaccagtaccattcccatgagaactagttaatccattaacccattaatccattcatcagggcagagccttcatgacccattcaccccttagaggcctccttctcaatactaccacactggggattaagtttcaacctgaattttggaggggacaaacattcaaaccatagcagggaagggaaaatgtttaaacagacattttataccaagacttaaacagatttcatcatgcaaagaaataaagaagaaatcacatgtgaagtggtatattttagtaataactccagggtgttacctcctttgcaaataataggatcccataagtaatttacatttatctcttacagaaaatgcatcagaaacatggattggtttgagcagcaataaaattccagtttcctttgaatggtctaatgactcttcagtcatctttactaattggcacacacttgagccccacatttttccaaatagaagccagctgtgtgtctcagcagagcagtctgtaagttgattcatttgttcagtgctcactttgctggtcttgtactgaaggccacctgtgttggagctttgggctgtggcagagaccaagacaggtgcagtccctgttcctcatgggccttccatgttagagagcaaacaagtacacacagaaaaaacatggtaattatagttgtaatgattgctccaaggaactatgtgacatgatagtgaaaagcttgggttggggcaggacaggacagccacagaaagcatttctgaaaagttaatatttaagcttggacttaaaaaaaaactctcagagagaagggggaagaatattctaagcagaacatgcagagggtagcaagtgcaaaggcccaaaggcagaccaagacttgccatgttgaatgatcaaaaaggagaccagtagtgaggaggtcgtaagagatgggcagtaggaattctaaaatgccaggtttctagattgtggtataggaaccaataaagtacttcaaggaaacaaagggcatgacctgatttacattttacaattaactgtggctgctacacagagaatggttaggagaggaataaaatggaagcagaaaagccagtttggaggctacaccagagttgacttagggtagtgactgtgaagagaagtggacagatccaagtgtgctttggagaacagaaggtgttgctaagttagatgtgggggtgagagagaggtcggcttttggcttgagcaaccatggttttggtgtatggtggtgccattgactgctgtgatgaagatgaggggaagaactgagggatggaagattactctggagagtgatggtttttaagctccattatgttattcacataaaaggatttaaacagtatgtgtaacctctttgaaaattgtggatcagtggcaaatcttgctttttttcctcatgtggatggagtggtccccgtagcctgaacatcacattcatccctatgttctagtctctcatttatctaaagcatctgattatacagaattagcttaatcccaagccatttgaacagtttattatgcctaaaacagacttaatctctttgatcaagatagctgctgaatacactggctgagttttagggggttgttgggatttggtagatgtccatgttcttctaaccaccaggatactctgtcaggttctccgaagaggcagtttattaaatgttactgatgtggcttgacaaagtaattatgccagcaaaacaggaagcatttctaagcacttaacttttgtgacatgtttcatggttccatcttttaatgctagcacagacaattacaattgtacagtgcagtaacaattatacatgctaaggcagtgtctctcagccccatataaaggagaaacaatacctctaaatgtctgtcctgggtctagctctgctgaaatccaccacaatgtttgtttgtttgtttgtttgtttgtttgttgtttttgagacagagtctcactctgtcacccaggctggagtgcagtggtgcaatctcagcttactgcaacctctgcctcctggattcaagagattctcatgcctcagcctcccaagtagctgggattacaggcttgcaccagcatgcctggctaatttttgtatttttagtagacatggggtttcatgttgcccatgctggtctcagactcctggactttaccatccttggcctcccaaagtgttgtgattactggcatgggcaaccgcgcctggcccaccacagtttattctacagtatctgctgatttattggttcattagttttgatataatttaggtgatcatttcttattgacaggcatgggtatgttgctctgcaagtttacagaacaggagccaatatttggacagagatttttttttaagagattgatgataggtattaatagtattggatatgtcaggacaatgctgccgtaagtgtaatattttatggccccttttctggaagctcagaagctccttaaatagtagatgtgtaaaaattaacatttatttccatggagtagaacttagtatgaatataattattataattaacaagttccccaatcacagttgacacaaatttgaatatgagagcctaggaaacaattcatttgttcttccattcatctaacagttcttaactatagtatgcctgacactatcctgtaactggattgtttgctggaagactccatgggggagcgatgcagggctcctcttacagatgaaggtatcagccctggacgttgtatttttctaagggtcatggaagggctccacattcccctaaaattctagatgtgtgaaataccacctggaatttgaattgtgtaactttagcctaaggttctgatttgtgttattaaaaaatcctatgggaggataaaattttaatatgttagcagttattatatcattattaatgaaagatctgagagtagccttcaataggattagagaaagacatgaaggtatctgcctagcatataaagaggagatggggtggtgctgttcgaattcctgatggagggatcattgaagggtgaacatgagtttcagctatgccaatattacctagggtgtttcatggtagcttccaggaatttccccagcatcaggtagagacatgaaagcagcaaagcatttaatgtaacacttagaagtggttgaagagaggcgtcagcactctcacttggtcaggaggatggcttcatcccagtggttctcacagtgtgacccccagaccatcagcattaacatcacctgaaaacttgttaggaatgccaattctcaagtcccaccagacctaccaaatgagacactggtcatgcagcccaatcatctaggtttcagttagccctccaggtgcttctggagcacactcgagattgagaaccatggctctatcccatcttttcatagaaaaattgagaacagcttaatggaaagccaggctgaccttggtatcaatcctagctccaatttttactgactctaggaccatgtaaaatgctaactctaacctttaaaatgggaattataatccctacctcactggaacattgagataatatatgaaaatcgccctgcattaagcctagcacatggcagctatcaagaagcaccagttgttaatagttgctccctctctcctgcccacccagttacagattgcacaccttggaactcatgctggagagaggggcctttccctagacaaagtgtcaaccctttccgtgacaaagcagagtgccgcctgaaacattatcccacgcgggagcacattattcatcatatttttttttataagaattgctattgcccatcggcatcagcacagagtgtattcattctcttgtaacatttttctccgtaggagggacactggaaagtcaaaaattgtgaagaaagacttttttacatttgtaaaaaagcaggccatgtcctctctgatgctgaatcaggatgtcaagaggtaagtgctgttaacattgcaatttaggtacagggacttcatagctagaatatcaattccaccatcaatttgaagtgaatttctctttctcctctctctctcttctctctttcatctctctctctctcctcgcccccccccccttctttcctttcctcttttttttcctgtcctgagaaatgttgtcttgctatcttctacacaggattacttttcttttgagattaaaaatgtaaatggtcctgatacagcatctgtacagtgactatcctgtgatgtgtgatgccctgtctcacacttggttttcctagtctttctttcttttctttttctttttcttttttttttttttttgagacagagtcttgctttgtcacccaggctggagtgcagtggcacagtctcagctcactgcaacctccacctcccaggctcaagcaattcgcatgcctcagcctcccgagtagctgggattacaggcgtgcgccactacgcctggctaatttttgtatttttagtagagacgggattttgccatgttggccagacttgtctcgaactcctgacctcaagtgatctactgcctcggcctcccaaagtatcgggattacaggcttcagccactgtgcctgacctatggttttcctagttttcaagtgagatgtcataaaacaattgtgttcctctgagtcagagtgaactatgctttatcagtctcaacagttttccagacctggtctttatgcaactatgctttaattattttctcttctaatccagttatttgtattgcaattgaacaatgacccatccccttagaatcttcattttattcattaatcaatgtgtaaacaagtgaacttcatactctagttggatagtagatatgccgtagctgacatgtcaccattttatctaatgattataatctctgaattagttatagctgatctctgattaatctctacctgatatgaaatattgaagacggggcaggggtgagggtggggggatttgtcttactgtggctttctgggaaactcaacgtgttttatttttgttgaaaggacaattaactttttacactgcaaatacagaactgatgttctattcaaacttttgttcatggcttcccttttccagccagcattaccagtatttaaagttcctgagttcatagccaattctctagctttgtgaagaaatttccagtaattttattatgcatcagtctatgaatatggttttgaaagttttctcttttttagaaagttgcttcaatgcaattctctaaacagtctgcacttgaaaaatcaatttgtaaaatcaatcttgataatttcaaagcaaaagaagtgatttgtttttccttctgagtcacttttttgggattggacaatatgagcaattccttcagttttgtcaccaccatcctttcatttaaaaatgaaatggcacctagtgtacaaagggttaactgatataatcagttatccttcccgtattcattgtgtggacaaagccttgaagtaacaagtcggtgtttctgattattctatgccagatctttttttccctcccttttcttgagctggttcagttattggatttttttgtttgtttgttttgctaagcagcctatgatctaaaaactgctaatgaagaagaatacattatcggaaaggtcaaattgccagcctccctctccctgtccttccaagtacaggagcagtctaatatccctgctcctaccctggagggatgcatgaaggagctgtatggagctgtcagttactcacagagagaagattgggaatagaagtgaaggggagtgagttcagagcagatcctagatggctggatgtgggagctcctgtgcttcctacctcagttaatgatatgtttgaactaacacagctgatctctaaattaaggttttctttaatttactgcaagaccaacatcttttccaagaaatttatgagaaatcattttataactgatcaaaagctggcaagaattggcatagcataaaatgaagagtgttttaaaactggtgaataaattaaaatagataaaaatgatgtgatttaataatattggggaaaaaagaactaaaatagctcagtttaaatatagaggactaatgaatgtatgtcttaccatactgtgtgatttcagatgagattgggcacattcagggtggtgtggccatagactgtactgcatgatttcaaaggaagagccacccttcgttgttcccagggctaaaacatagacctacatgtttgtcatttttgtctgagtgccaaagcttactttcttcccctccaaaaggccagccagttaatttaggaataatctttacaaaaaaaaaaaaaagaaagaaaaagaaaaaatacatatattggccattctctatttggaagcattatgctccaaacaagaccatcctggactgttccagaattgggtttcaggcccaactgatccactagtttgactttatccaagtccctaatctcagtgaatctcagagggataacatgaaataatcaatatgaaagttgaaaaaaatctctaatattatctagatacatatattctctttgttcatgttctctttcccctctgttcaattctaaaatctctatctgcattgtccttctctgattctcagaacaaccccataaatactattattatcctcatcgtatagatgaaaaaactatgatattaaacaaggttgcacagtagtggagccagaattcaaacccatgcatcctgaccctagagccaacacttaatttctaccctcctgtcggggccatttatatgaaattctgtaagtcagagagagacacacacacacacacacacacacacacacacacacacacacacacagagagagagagagagagagagagagaaagagagaggtagagatcttgaatgaatgccctttattttcatttacttttaaggttttacgttttaagttaattaaaaattttaggttttaagataataaattaaataaatgtagaagtgggtgtagttaatggcattactggatagaataaatataaaaatatcaagacaaaaattcaaggagttttaaaggagtaagagaagaaagttatgtaggtggtaaaagagtatgcaaaaatatctcttggtatttaactaaatgagattgtgtccttaatttcccttttattctttttaagggatgggagagacatggtggattctgttacaaaattgacacagtccttcgaagctttgaccaagcttccagcggttattactgtcctcctgcacttgtaaccattacaaacaggtaaattaaactttttttaacagaaacaagacggctttcacatgaggactcttggaatgataaaatctagctacaatcataactgttcaaaatctaaattgtgctatacatcaaagtactaaattatttaagttatttattgagatgaatttaaattatactatgttattccagaattgatttttgagtaataaataataaaatttaaggtgacctttactatctgtaaagatttattaattatccagcttttctaatatattcagatgtttttagattttatcttctaactgcttatatgggaaatgaaacccattatttattttttattttattttttttcatttttttgagacagaatcttgctctgttgcccaggctggagcgcagtggtgcagtctcagctcactgcaacctccacctcccaggttcaagcaattatcttgcctcagccccatgagtagctgggattacaggcacctgccaccacgccctggtaatttttgtatttttagtagagacggggtttcaccatgttggccaggctggtctgaactcctgacctcaagtgatccacctgcctcagcctcccaaagtgccgggattacaggtatgagccaccgcgcccagccaaaacacattatttaacaagtatttttttgatgtaatgtatgtgaattgtatgggggtgtttttagcagaaaagctataaaatgtggaggatattcaaatccttcaccatcacttcttccatctattttatttagattgagacttctctgtgcacatatgccttcctgatgctggcacagagactgtgccctttttacactccatacaatctgccccatggtaccgatgcataatacctgtaggggataaaaataccaagagtaaaggtgacctcatatcagtatcgatgccaggaggacagtgggggctggaacacctgggagacccactcctcctggggaagacagaagcggggtagaactccagtggtgccacaggaaactacacctgcaaagcaagtcacttgcatatttacctgggccattgcctttaaaaatattcactgaataccagcaaataggacaactggttttacctagagacccttcccatataagcctaatttgtagaggaattcctgtatgatttctctgctcctcccacattggaagtcaacatccaaagctgccagtatgtccttcctcctcttaccctctttcttgccttcttacccagcttctgttccaaacaatgcacaggaatgcatacacacacacacaaacagacacacgcacacacacacacactcaaatggattgatagcatttggcagactaagtcacctggtgaaacattttactttcaggagatcctcccgtcgaaatatagcactacctttgatgtatctcagcattgtttttagttctacctttctcctcccaggtttggctaacaggcagaagaaagcctttatcaatttgttaactcacccaaaaggttccaagagcaccttgggttggaagtcccccagtcagtgagtcaatactggacttcacaggaggctgaccaatgaagctatacgctcttttgttaattacaatttaattatgttttttaccaaagaaaataagtccaattgtttcacctgttttttatgtcttattctttatttttttgtttaatgttcattgagtgcctgtcacatacctggcactgtgttaattatttttcatatgttatctgaccacacaaaaaattaatagccaagagtttattagaaaattttttttgaatacctgttttgtgagagtccccatattaaacactgacatgctatccacaagaaataaaaggcatgctattattgtccagtgctttctgaaacccagcagctgaagagatcgaacatagacacaagaaataagtgaagaaggtagaatagcacaataaatggataaactcacagtgacattacagataacccatagtgccacagtgacccaagctaaggcagaaatctgttagaacaaatgcttcatattccatgaaccctttggggacctcatacaaatgacagaaagtatctgggaaaaaaatctgtttcattttccccaaaactggatacaagactatgttgtgaatactttaaatgttttctctggtaaactgtattcagtagcaagcgctcatgcctggtccatctgtaaagcagaactatggcatagagaagtttgtttttatcccagtcttggcctcctacgcctgtccagattgccctgtgctggtgtgctgcctggtcacccgccaagccctgagggagtacagatgagcaggatgtgtcatctgtccaagtcagttaacatatacttatgctacccccaaaacatgtctacattcaaagcagcaactccaacacaggactcatgagttgaagaaagaaagggccaatgctcttggtttttaatcattcagagtccatcagggaagaaacaagggtccacactgtactgcttttgattcaccatacacgttggaatttttgcaaacagcatcttttgtctgagaaggttgggcagtagatggaaagtgtctcagatccaggagtgtccactagtggccatggtaatcattttcttccattactgatttcctgtttaagacactcctgtcactcttcagtacccaagcttgtagttgctaattgattttccactcttctgcacaatggaatgacaggtttgatgggcacaattagaaccacctgctacaaattacttatttcttttgtgatcaggcaactgctcctggtctaagacttttaacactttgtggaatagagaggggaagaaaaacagatccttattgttgagtaacaaatttttgtttgcttgctgattgttacaaaattttttcaggcctggccactttgcttccagacaaagcatgaatgcaaaagttgagttccaaaattataatggataattggctaaatccatgtatgtctaaattttgaatcaatcagccatagaatattggtacaaaataatccaaatggcattcaattttgtgaattttgccaaaagtgagaaattctgcaatatctcattttctcctaagtttattttactttcatttatttttgagacagtgtcttactctgttgcccaggctggagtgtagtggtgccttcatgactcactgcagctttgacctcctgggctcaagtaatcctcctgcctcagccccccaagtagttgggactacaggcatgtaccaccatgcctggctaattttttaaaattttttacagagacaggttcttgccatgttgccatggctggtcttgaactcctgggctcaagcaatcctcctgcctcggcctctcaaagtgctgggattataggtgtgagccactatacccctcctaagcttaaatgtgcattattttaaagcatttttacagctctaccgttttcctgcaactgtcatatctccccaaaacacttttgcagttaatattttttttattgtggtaaaatatacgtaaaacacacataaacataaaattcaccatgttagtcatttttcagtgtgcagttcagtgtcattaactgcattcagattgttgttcacccactaccatcatccatctccagaacttttttcatcttcccaaactgaaactctgtacccattaaacaatagctgcctattctcccctcctcccagaccctggcaactactattctattttctgtctctgtgagtttaactactctacatgtctcatataagtggaattatgtttttctgtgtctggtttatttcatttagcatgttgtagtgtcagaatttcgtttctggaaattctgttttaaggctaattcatattccattgtatgtatatacacatattgtttatccattcatccattaatggacatttgggttgctcccaccatttggctattgtgactaatgctaccatgaacatgaatgtacaaatacccttcgagtccctgctttcaattctttggcatgtatgcctataagtgaaattgctggatcatatgataatttgattttaaattttttaaggaaccactgtactcttttccataatggctgcaccattttccattcccaccagtagtgcataaaggttccagtttctccacatcctagccaatgcttactattatctggttgttttgttttgataatagccatcctattgggtgtgcagtggtatttcactgtggttttgatctgcattccactggtgattgatgatgttgaacatcttttcacgtgcttattggctatctgtgtatcttctttggagaaatgtctattcaagtcctttgtccattttttaattgggatgtttgtcttttctattgtttagttataggaatttttaatatattctggatattaatcccttatctgatgtacaacttgcaaatactttctcccattttgtgggttgccttttcattctgttgatagtgtcctttgatgcgcaaagtttttaatttttataaagtccaatttattaatttcttattccgttgcctgtgcttttggtatcatatacaagaaatcattgccaaatacaatgttatgaagtctttttcctgtgtttccttgtaagagttttatagttttagctctcatgtttaggtctttaatctactttgagttcatttttgtgcatagtataaggtaagggtctaacttcattctgttgcaagtggttgtctagttttccctgcacagtttattgagaagactgtcctttctgcactgaacagtcttggcaccattcttgataatcatttgacatatatgcaagggtttattcctagtctattccactggcctatgcgttagtgtttatgctagtaccacactggttttttgttttgtttttgttgtttttgagacagggtctcactctatcacccaggctggagtacagtggttcagtcatagctcactgcagccttgacctcctgggctcaagccatcctcccgcctcgacctcccgagtagctgggactacaggcatctaacaccaccacccacagcaaatgttttttatgttttgtagtgacaggatctcactatgtttcccaggctggtgttgagctcctgggctcaagcaggctgcctgcctcagtctcccaaagtgctgagattacaggcatgagccaatatgcccagcccacactgtcttgattactgtagctttgtagtaagtttggaaatcaaaaagtgtcagacctctaacttggtttcttttcacgattatattggctattcagggttccttgaatttccatatggattttaggatgaacttttctatttttgaaaaagatatcattgggattttgatagggattgcattgaatgtatacatcactttaggtagtatgagcatcttaacaatattaagtcttccaaggcatgaacacgggatttatttccatttctctgtggcttctttaatttccttcagcaccattttgcagttttcagtatacaagtctttcacctttcagtatacaagttttcagtatacaagtctttgtgtagtttattcccatgtattttgggggcactattgtaagtggagttattttcttaactttcttctggccaaactccacatcgttcttcctgtcgacggcctgccggcatctgccagtgcctgtcggtgtgctcttccaccggtgtgttcctctggatgtccagccgcttgtctgtcttccagctaaggcctcgggggattttacaagcacaggatgggggtgtggcaagccagggtggtcttgggaaatgcaacatttgggcatgaaaacagaaatgcttgtcctcacctaggtctgggggcagaggctgggggtggagccctaaccagggaccccgcccttctcctcccagcacttccctgacccggtattactactctgcctcagaggagatagagaaaagcagatcgtatattattgagagcatgaaccaacagaagtgtaaggaaaattacaacagcatgtaggcaatatttagtcttctatatgttccttttgaagcacatttatataaggttctgccagtatgatctggattaaaaaaagaacttttcttgtttcaaatgtgtgctatttaggttattaatagagtatctgcagaaaatatttactaaagtatgacgaaaatccatatcccctgcaaagatgagtaccataaatacctaagatctctaaatgttgctaataatatctgtaaggcacttaaaatttttacttctttttattcttttctctttttatctcctatttcctttgagactcttctattcataaatgacctcattgcttttgcttcccttagcaagttaaggatgcacagtaacgaaaaaagccaccaaaattgaatgaaaagatctaatttgctttctccttaggtttcctgggtaatggcttcagcctttccttttccattgactcagcaggtctgcccagaagtcgccactgtttcaaatgtgcttcttctaactttgtatgttctaaaaatagctttctcaagatagtttcaacttagctgaaaggttcaatgctagttaaattttaatagtcatgtttttcttagtaggtgtgcatgtggaagcatgtatgtgagtcttctatattctgcttttgatgcattcatactggaaagggggcactgccaccaatcattgaacagtaattcattcagctgtttgggaagtatattagtggatgtacggccttagattagttcctaggctttcacatttttcttcagtgaacatgcagatttaaacacatttgaataagctgagacctacctctgcctatgaacacactgatttgggagacataaaattgctactttaatttctgtttctttctcaccaggcaagtgaggtaggtgggtgtgtgtgaactctgtattagtaaatgctcattcagaaaagcataatatctttcctcctccctcctgcccacctttaccccgtgcatattgtggcatggtgtgtgtggtgtgtggcctaattacaaaataggccacatcgtactccaagaaatgcattgctggccatgtgaactttaccacctatgctttgaaactggagctggactctctattctgtgcaagaattaagccccatatgcaagagtcagattctgctcactcatatagttctgggaattgcactgacattcggcatttattagtaatgttcagggtctttgggtgttttcctgttccatgttctaaagaattgatgagaaatgcttactctggggccattctgtgcacttcattatgctttaatgacatttttttattgcccagaaacttaatgtaaccacttcttttttccccttttaaggtttgaacaggcttttattaccagtttgatcagtagtgtggtaaaaatgaaggacagttatttttggatagctcttcaggaccaaaatgatacgggagaatacacttggaagccagtagggcagaaacccgagccggtgcagtacacacactggaacacacaccagccgcgtgagtagagtgtgctgcatcaccaaccctccctgttttctttactccaaattccttccaccccttggcccacctcctttgattctttcttaatgttttcttaatgcctaaatcaattacaaggatcaacacaggttaacagggggtgacatatggctgatctttgtttttatttattttatttatttgtttgtttgtttgtttgtttgtttgttttgagacgaggtctcgctctgtcacccagcctggagtgcagtggtgcaatctcggttcactgcagccttgacctcctgggctcaagtgattctcccacctcagcctccccagtagctgggaccacaggcatgcgccaccacacccagctaatttttgtattttctgtagagacagactgatattgaactcctgggctcaagcaatcctcccaccttggcctcccaaagtgctgggattatagacatgagccaaattgcctggcccaatggtcatttttaaaagtataatccgtatgagtcatttgacatgttaaaggtataaattcatcgctcaggaccaccactgcctttattagcagcaagtccagcttctccctcctaatgtctttctccccacctgcaccccccactgtctaagaatctcaagtgcttactcagttcagaatggtcagttaaacttcaaagtacggtggatgggcacatatgggtacatccaatcagttcacagtcactgcctggggtaccttagccaggattccagcgttaacagctctactagttcatcctcaggtgttcagctctgaatcccaaggcatgaaactgtgccaggttggtcagtaccagagaagctgatgtcttccgccacagcctacactagaaccagtctctgtggaacaagcttcaggcccttgtattaagctgaggttgacagcctagacccaacagcccctctacttcagggtgagttcttgcttgcctgtatctccatcagggctgtgccagagacaacagcaaagagttactaagtttgtatctagaggaaatggcttaggggccccaggctcttccctccttgaaggcccggagctctttatacaaattggtctattccatcctcagagctctatataccaaggtaaggaaagtgtttgctaagccacagggggaggtatatctcccctttagtgtggcctcacactaaaatataaaagtggccacacaagccttgtttctcataattacaaaagtccagtccaaggtggtttgctaatcccaactctagacagtggttggcaaagctccaccgatttttaaaattcaacgatgaaatcatgaatatattcttactatagataatgtgaccatatacctcatttgcccagaacggttctaatttatgtctggtgtcccagagcaattaacagcaggtatttttactccaaatttttctggcttggatggtaaattatgtagatgctctaattatagagaagtgtgctaagtaaaatgtggaagtactccgttacatctttctcttcaccttcccaacatcaatacatttcccttttcagaaacaaccactgttaactgtttggtatgatcctgctggtgtttgtctatgcattgcatttaaatacatttatgcatatgtactttttaaatggatataaggattgcatgtttctgttatttgatttttttcacttagcaatctgtcttagagaactttccacatcaatatttattagtcgacatttgaaacagctacatagaatttcatagtatgtaggactcataatttgctttgccatgaccctgttgaaggacattgggtgaaattcattttcatttctgctacaaaagtgttacaacaaatatctctatgttgatgtcgctgtgcataactatgagcatgttggcctaaaagtgtacatcttactgaggcattatcagtttacaagttcatctaacaaaatttgagagtggcagctttcccacatttttgtcaatactgaatgtaacaaccttttacatttttgccaatttgatagaataaaaaaagttttactattcttttaatgtctaccttttcatttagttatttgagcaatttttcatatttgttctatacattttgttttgtttttcaactacatggtcacataatttgatcactttctatttttattttggacactttctattttctcattacttagtggaaatttcattatattctaaatataaactctacatgtttgctatttgccttttaatttttctatggtatgttttgtcacacataaatgttaaactttttgtagtaaaaaagtttatatttttcattttagctttgtagatttttatattttctaaaggctttgctcaaccaaagattataaaaatataaccttatatttttatagtttggctttttaaatgtataattttgattgatctgagattttaaaagtatgttctaggagatagctcattttaatttttctaaatagtaaccaatttcaacactatatagtaagttcaccctttcgtctactgattcgaaataccataataaacataacctacattctcattttctgtttccctgccaatatggcactaacataattcaagcagtgtggtattgaaaaagaaatagaaaaaatagaatcaatgtagctgaaaagagagcagtaatacaagaatataatttctattattcttagttttcttggagctcttttttaaaattattaacagattttaaattttactcaacactctgaatctactaagacaatcctaaggttttctcctttactctcttaatatgacaaattgctttacagtagtaaaccagctttgtactgttgggtaaacttaacttagtgatatgtattttaatacatctctgggtttagtttgctaatacaaagcttcacctactataatgtacataagaatatcctgtagattttgatgaagttaaaattctgattcagtagatctggggtaaagtccaagaatccgcattttttaaaaagctcctaggtgctgcctatgttgcaggtacacaaactaacctttgagtggtaggtttatgattttagcaaccttttttcatagggaaaactagtccacatttcttcatttgtatacagctttggtttcatgattatgctaagtttcatagaatgaattggagagtgttcacttttattctctacagaactatatatacagtaaacatttattagaatttgccttatgttttatataggaaatttaaaaaccactaattcaatttctgtaatgcttataagactactgaggcttcctacttccttccaagtgctgcttgagttgtatttcacaagatttagtagagttttataatttttcaatttagaatacattccaatttccaatatgaatatgatttcaacccataaattatttagaagattttttttaatttcccaaaatgcaggtgtttctagttccttttgttgtcaataccttatttaattgcactgtggtcaagaaatacggtttgtttggtgcctgtcctttcaaatacaaagttggtattatggccttgcatgtgttctttttatatatatatatcccatatgtacttgaaaagattgtatattctgcttttgctacctgaaatgcttcatctatgtcaacagattatgttaaatgtgttgttcagatcatctatagcctcaatattttttgcccacgtgatcaatcaattattgagagtgtttgatacctcccactatgatggtagatgtgtaaacttctccctgtagttctgtcgaatttttgtattacatactttttaggctgttttattaggaacatacaagtttagaattgtgatatcccacctgtggtgtcaaaatcggtatagtagtatcccaagtgatcctcttgttctttcaaaattattttctccttagagttaatttgtccatgaatgtagctacagtaactttttaaaaattagtattggcctagtacattttttaaatttttttctaactttgaatgtttttgtgttcttagagttaatgtatcacttataaacagcatataactaaatttttaaaactctattcacacattctttgtccttaactgtatagtttggtttacttatattttttgtgattatgtatagaattggatttatttcttccattttattatgtcctttccatttatcctgcattttttagtcatgttttctcttctttcttgccatcttttgaatgtatctttttcttcttttctcatttcattctttcccctttacttatctgaaaattgtattatctaaatctatttttttatttgttacactagctattcaacatgcattcttaacaaaatcaacaatatcaaagttattcatctttaaaaggattataatttgctgttgctgtctagttttgaaaattctgaactgcttcatttctgttagccatgattttgttgttgttatctttgcaatgaatatttgtttagatgtattcatatactagtgtaccattccttctgtgatctggaacaccttcagtttcgtatccttttcattagactcccgcaacctgaagatggttggttttacacaactctggaaatttttcaagcattatctcttcaaatactgcctctccccattcattctaatatttccttttatcattccaattactcagcctctcctccatgtttgttaatatttttaaaatattttctacctctgtgtctctcaaggatgcattttaaataaagtcatgaattatttcaattcattgattctctcttcagccagatctaattaaattttattttttagttttcagtgttagatactatatttatttcatttctagaaagtctatttctgttttaaatttggtttgtggttctttgtagtcacttgtttcctactcatattttaaagattctctttcatttccttaaatgtatccgagttattttgtatttggtttctaataatctcatacctgaagttgtatgggtctgtttctggatctcatctctttcattttgtgggttttgcctagaactactgatttttctttgtactttatttatgggagttctctcacccccagggtgaagttgggctcctccagtgaaaattagcatttgtttccaccactcagtttgaggcactaccaactaaggactgctttaaaagctctgactgaggttttcttgaacacataggtagcatgaattcgatgactaacgactaacctgcatgaagtttgggttgtggttataaattctttagaaagttatttcttttcttattattcactcccaagattgacagagacaagtttccttacaaacagctgagtgaatatattctcatgtacgcttaccaaaagtggccatttgggattctattttatgcaggtttcttctgttagacttttcattttgtatatctcttaggcttcatctcctttcccttaaaatctccatgcaactatcaaagcagatgctcaaggtctccagaattggaaagaaacctttagggtaaatcccactaggaaggtagtttggctaccatggttcatacttttacttcatttgcaagctctatagatttgtttattttatgccagctcagccatacatttataaagatgttttcaaaatgttttatccagcatttcaactagtttgaccaaaagaatctttcagggtacctaatctgctggttatttctcatagcaccatttattttaacacatgagattttaggatagagaagagataagcacatgtattcagtctactgctcaatctttgagatgtctctctctgtgtttttaaaaattttttctttctataaccctattgcataattaaagccattcatttaatgaacttttacaaggcatttgtatgacaagggacatttaaaaattacgtaatgtgcatgccttcatgttgctataatctgggagtggtgacagcaaatacaataaataactcatatatagattcttagtcattcctgttactataacaaaatatcacatattgggtaatttataaataacagaaatttatttctcacagttctagaggctgggaagtccaagattaagttgctagcagattcagtgtctgctgaaggccttcttgcagcgccctcacatggtggaaaggcaaaagagcaaaacaagactaggacactccctcagcctcttttataaaagcaccaatcccattcatgaggatggagcactcatgactttattacttcccagaaggccctgcctcttaatactatcacatatgcgttttggagggatatattacattcaaaccatggcaacaggaaaatgtgtggtgagtgttgtaagaagtataaaataaagaactctaacagttaaatgaagggaggattaattcccattgaagttatcataaaagttcaagaggaagtggcctttcacctgggattgaaaatgtctgaaatatagtaggatttagtggttaaagaagtaaaaagaattttctcagcaggaggaaatatatggggcaactttgagaaattttaggagcactgtgtaattagagattaagatacatgcaaaagagttgtaaaagataaggccagagtaggacattgaaactacagcttaatattacaagctaaagagttttcacttcttctctaggtataggaagtcactagaggttttggatcgaaaaatattaggatcggaagtgttcttcattgaggttattatgtagggtgatacaaacagatataagagactgcactgcaggataacatatgcataaagagtacctacccactactgagttgaactaaagttcaaattccagctctatgatctcagggaagttatttaatctcttcatatctcagttttctcttctttaaaataaggacagtaattgtatctacctcacaggattgttgtgaggattaaaagaaatattacatagttgctactgcattgtaaatacttaataaatattagactttcttattgcagagaaataatttgcaggattttacctaaagctacagatagtgacattgctaacctattagggttcctcacccatacattctaagatgcaggacctattctgtgctggaccagccaccaatgtgagcaccctgggaaaccacagagttttaaaggaaggtatgattgtggcctatacacatacatttccccaacacttaggagctagtgttaaatgtttttaaaaaaaattcctttagacctcctgatattagaaaaagaaaaaagagagagatcaaagaaagtcagtttacattctctctgttaaatacatggtttaaaaccctgtacttttgaagacttccagttcccagacgagcatataagaagtttagaagttacaccatcctaatgagtaaagagctgaacaaactgaaaaatcaacaactcttcttagatccatcgcaaggcaaaccactgctgccccaaactggagaaataaaaagatacagagaatcacagcttcctggatcagaaacccatgagcagaaatctccagaggaaccagtgctgggagaggaacatctgaactgtcattgataaaactgctggaggctcaacacagacaactctaagggttaaaaactgtaggggactcagtcataagggacccccacacttttgtgagttctagctccaggtgatctatcaggttatcacagtgaaatatcagagaaaaattgcctaatgcttccagcagagggagaggaaaaataaccattttgaaatatagcaaagcattctgttcttaacaaggccccacctcaggaaaggctattttaccagagactgctactggagttttatcagagcctaacttatctggaggaagggaaatctgcaactccagccagctctatcctttcacgtgatggaaaggaaataccccgctccagctctctagccatcctgtcccaccaagcagggaaaaataactgagaagcattcactggtcaagggtgcagtccaggaacacaggctcaccaaaaggctgagacctaatggtaaaattgtagaacgcttcccctcctctcacaccttaccattccatcacaaaggcctgtttactgcagtttcttttacccaatatattacatccacttttcaacaaaaatattacaagacatgctaaaaggcaagaaacacagtttgaagagacagaacaagcatcagagccagtcagctatgacaggaatgttgaaattaccagacaagcaattcttttaaactatgattaatatgctaagggctttaatggaaaaagtagacaacatgcaagaacagctggatcctgtaagcaaagaggtggagagtctaagaaaaaaaacaaaaagaaatgctacagatcaaaaacaccataacagaaatgaagaatgcttttgctgaccttatagtagactgggcacagatgagaaaagaatctctgagcttgagtatatgatgatacaaacttccaaaactgaaaaacaaagaggaaaaagactgaaacagaacagaatattcaagaactgtgggacaacttcaaactgtgtaatgggaatatcagaaggaaaagaaagaaataaaagaaaagaagcaatatttgaagcaataataactgagaatttcccccaagttaatatcagacaccaaaccacagatccaggaaactctgagaacaccaaccaagatgaacgcacgaaaaactacacgtagacatattgtatccgaacttcagaaaataaaagataaagacaaaatcttgaaagaagccagaggggaaaaacaccttatctttagaggagcaaagattagaattatatctgactgctcttcagaagtcatccaagcaagaagaaagtagcatgaaatatttaaagtgttaagagaaaaaagccctccaacctaggattctatactctgtgaaagtatcctttaaaaatgaaggagaatttttatcagattttatctgatttttatcaaacaaaaattcaggaaatttgttgctagtagacctaccttgcaagaaatattcaaagaagttcttcagagagaaggaaaatgatatagaagctcagatctatataaagaaagaaggagcatcagagaataaatgaaggtaaaataaaaacttctatttttcttagtcttaattgatccaacaaataacagtatgtttaaaataatagcagcaatatattcagacataggtgagatagatagatagatgacagatagatgatagatttgcttttatacaagtgaaatgagtgacagggatgatgcaagggataagagggactttgggtgactgtgatgtgtccttgtaggttcatcagtggtaataaatgtaccactgtggtgtaggatgtctatagtgaaggagattggagggcagtggtgttagaggggaactctctgtattttgcgctcaattttgctgtcaacctaaaactctctgttactaaattttaaaattatacttttgaaagatgcatgcaaagtgaaatgaagacaaattagatttttttgtatataaacatcagcttaggaaatttgtatggaaactggtgactttccatagctccaaacaagtaacatcacaatttgctcaacagaacgaccttgttctacaaatctatgaatattattaaaataaagagagtaataaacttccatgtcacactatactgcaaaaaaataaaagtttaggtatcatttctatatactttggaattttgttaggaatgtctataactgtcaaaataaattaatacattttgagtagagaaaatctttggtttttaatattaagtttcttggggcatatttagatgtcgaaaatctggaattgaagcagagttccttgtcattcataagtttctgctgtaatttatttgagtgacactgctctttttctcttttccctaaagcaaaaataatgccatgatgttcagtttggctgctcaagctgattgacgctgagtaaattgtctctgaataagatgaaaatgtaaatctttttgaagaaaatagcaatataaaagctcctgtgtttccctttttcttttaaattgcagcttgcagagacactacctaaatcacatttctttcctgcctgtcacaaaagaatccattagcttggtccccacatcagaatcttaatccagcaaagactaactacatgaattgaccactgaacaggaagcctacagctttttataaactcagccaggactctgtcttcatgtcataccagcaaaatattcacccaccccacatcccacaccacagtcgtacatttgctacaattgacgaacctacatgaacactcagaaccacccaaagtccctctcatccctcctatcattcctgtcacgcatttcactagcataaaagcaaatcagaagggaatcacctttccgccatttttttttcaacttagtattaagtttatcaaatagtattaccaccagatggtatctaccagtagtagaaccactgtggtacatcaccaagcatcagcaattatcatttcatgaccaatcttctttcatctgtatcctcacccctttcccatattttttcataacaaatcctcaacatcatattgtttcatccataaacatttcagcattatttccaaaaaataaagactcctttttaaaagacataataatacaattatcaccccttaaagtaattaactataattgcctatcattataaatcttcagttaatgctcaaatttctaaatggctcataaatattacataatgtattttacagttagtttgaatcaagatccaaagaaggttcacacattgtaattggttgatagatctcctaaagtctgttttcatctctgtgtttcctgcccctccccaatttccacccctgcctttatttgttaatgcaaatgtgttttgtcttataaattttcctacagtctgggctttgttgattgtattcacatcacattgtttaatgtgttactctattttctttttcataaaatacgcatttttatttttaaaaagaatgaaaggattgatcaaattcagattttatttttttttttgaaagatcacttcctaggtagttgtgtgctctgtctagaggcacataatgtcccatttttttttctctttttgtgacattagcagcctttgatggtcaattcttagatccattgactcattaggggtttcttcacttatagctgggatagtcctataaaaagctaattccttttaatcaatttttgttaccccgtggtacaatttttataggaaacacagaacaaatgcttagttctttccctttactagctttcaaaatgattatttttgcattagcatccttcatctgtgacccattagaggtgtttttctttttttagcattactatggagtaagggttttaaacatatttgatatgttttagtccattgcaattatcctttttaatgctcaaattgccccatccttgtgatgggaatctcttcaaggaatatcttctgaatccttctgatgtgatcctagtagtctttgatagtgtccttgctatctggtatgacaagatataaatttctgctgcagacctagaagcatccattgcatcaaggaaccctggtttcttctgatgggaaatgatattatttcagcatcacagtctgggcttaagggtgctcgtcgtttgtggtttgttattgtttctaggccatttcaatggacagatctaggaagtgtgtgtgtgtgtgtgtgtgtgtgtgtaaattaaacactttttgagttcaaattcatatttacaatttgaattcaggactacaaggttaattaacctatattttaactggatttcctttctttcatgccaaatttcccattctcaaaacaccagaaaatcctgttatttttagtaaaaagcaacaacaaagggactctctgacacttggtatttcaagagaaatgaaatattcaggtgaaacaggaaaaatggttttcatccatactaattattgccactgattaaatggaaagatgataaattagcttctcattcaaggagaagctaatgcttagaaactaaaatgtactttgtacccctagattaaagattcaatataagtggaggttgctctatggtgaaagagaatagatgagtctatacttgttaagacattcgaaaacacttttccaagttatattagaggctcataggtgtctgtattgagaaaaataaacactttcaatcactcctttgcagccctccataactcaggctctgtgaaaaatgttttgtttctagacctagatacccctggcgtgtttcattcatatgggatgactccggggcatgttcaacccaattgttccaaacccatggaaatctgcaagtgacaaagaaaataagatcccagtagagtaagtcaggtttattttcttgaaagtgccctgtagtatagtttgaagtcaggtagtgtgatgcctccagctttgttcttttggcttaggattgacttggcgatgcgggctcttttttggttccatatgaacttcaaagtagttttttccaattctgtgaagaaaggcattggtagcttgatggggatggcattgaatctgtaaattaccttgggcagtatggccattttcacgatattgattcttcctacccatgagcatggaatgttcttccatttgtttgtatcctctttgatttccttgagcagtggtttgtagttctccttgaagaggtccttcacatcccttgtaagttggattcctaggtattttattctgtttgaagcaattgtgaatgggagttcactcatgatttggctctctgtttgtctgttgttggtgtataagaatgcttgtgatttttgtacattgattttgtatcctgagactttgctgaagttgcttagtgggtgaaggacatgaacagacacttctcaaaagaagacatttatgcagccaaaaaacacatgaaaaaatgctcatcatcactggccatcagagaaatgcaaatcaaaaccacaatgagatacccatctcacaccagttagaatggcaatcattaaaaagtcaggaaacaacaggtgctggagaggatgtggagaaataggaacacttttacactgttggtgggactgtaaactagttcaaccattgtggaagtcagtgtggcgattcctcagggatgtagaactagaaataccatttgacccagccatcccattactgggtatatacccaaaggactataaatcatgctgctataaagacacatgcacacgtatgtttattgtggcattattcacaatagcaaagacttggaaccaacccaaatgtccaacaatgatagactggattaagaaaatgtggcacatatacaccatggaatactatgcagccataaaaaatgatgagttcatgtcctttgtagggacatggatgaaattggaaatcatcattcttagtaaactatcgcaagaacaaaaaaccaaacaccgaatattctcactcataggtgggaattgaacagtgagatcacatggacacaggaaggggaacatcacactctggggactgttgtggggtggggggaggggagagggatagcattgggagatatatctaatgctggatgacaagttagtgggtgcagcgcaccagcatggcacatgtatacatatgtaactaacctgtacaatgtgcacaggtaccctaaaacttaaagtataataataaaagaaagaaaaacttaaaaaaaaaaaaaaagaaagaaagtgccctgcactttcagcctgtcccatcagtagacactagagaggccaatccattttaaggctcatcagagctctgaaatgagccaccatataaataaggataaacccagtctcatttctgagagcccttagaacatttccatatctcctcataatcatataagtaactgtcatgcaaagtgaaaatgtgacagtagatcttcaaggaaatgctgtggccacacacaggagagaaacaggatcagagggatgcaagagagctccatgggacaggagcataattttaggggaactcattcattcagttattcaactgcttattgaatgcccacccactcactctgtaccttgatactgtctcacagacccaaatacatctggtttcaaatcctggagcaagcctactacgtttgtggcctttggcaagttactaagcctctgtgccctaatttttccatctgcacaatcaggcactaatgcctgtctcaaagagtttctgaagttaaatagggaaaagaccatataaattgcctagcacagtgcctgtctcacagtagacccaaataaatctggtttcaaatcctggagcaagcccactacgtttgtggcctttggcaagttactaagcctctgtgccctaatttttccaactgcataatcaggcactaatgcctgtctcgaagagtttctggagttaaatagggaaaagaccatataaattgcctagcacagtgcctggcagatacacagcattgcaggaaacttgccttgcctacccaaagagcttcacttttctctgttagaggagagaagaaggagagagagagggaaggtgagagggtagaggacttgagagatgaggatgtaaagggttgttgcagggaaccagaaaataagcaggcagactcaagtgaaataattgtctagaggcactgaaaagccagcacaaaaagttttggtcaatgggtttgtttttaggtatttgaacagggaggtggacagtggaggttttcccagctcacttaattttgcatagataacttggtgaatcagaatttcttaattgacagaaagtctccccattcgtgtttgcaggagagagtgagtggggtgggggtaaggcaggtaaggagaatctgttaaaatgtgagattcacctctgagaataatcatttttcttctccagtgggaagtgagttatcaaatttaagaacaacttctctgaaagaaaattcgcctctgctctttcccacacccttacccttattatttggctttgcaagcatccccacgatataggcttataaatttagtttatctctcccttagcctggtctccctttattataccactttactgcttctttggggctgagactcttaaaatttgggtcaaatgttccattaagttaaccactttagaataccaataacacttctgcagcacttttcatcttcatagtggttcacaaacatctccttcttcactaatgaagatgagtcgaatatcttatagcatctaaaaccaaagctatttaatcattgtctggtgtgggaaagtgagacaaaatgcaagaccaacaaaaaagtatattacatttcaaacttgctgattcaaacttttgaaaaattctttgaatatgcaggcagaacttatgccacaaaaccctagtttttgtaatgaaaatggccataagcataatagcaacattgcaggggtatttttagctcttcatattttatagagtgcttttcagttcattatttcatttgatcttcatgaaaacccatgagaagaaaaggaattattattcacatattttagacaaggcctattgtggttaattcacatcctcaagtttccagttactaaagatttgtgctgagactagaaccccaaacttcacgctccaagtccgaagttctttccatgaggtttcctgcctgtgctgtgcagtaactggagtttccactggggcccctcaaaggacgggggaatggagcaggatgtgtgcgttcccttctctttcaactagagcagctccacaagtatattgcatttggggcttccacatggatttctccagttcagttttattgcacagagcatgcagcatctcttgtactgttcatgatccagctggactgtgagctgcattctgaaattattcaacaggcctgcaaagctccattaatggcaggggcagttgcatactataatttctcccccttgcctgcccacaaccttgcatctttaacaccagctagctgttctgggccagtagagccatccgatggcctttggatgcaccaactcttccttgactttcttttcttctatgtgagggatagcgtgtttcctcttttaccactggacatttttacctttgagggtctctgattcatcacagaggcccagggggttcttccagatcagaaccatcttgccatggcgatgctggtgcctaacacacttgtgcagccagcgctgttgaagacacaaacactcatacactcattctttagcaaattattccattcctaaagagatgctctatgtcttcctttgtcttctttcttctcctttgcactcttcattttccctctcttgtgtctttccatgagcataaaacaatcagaacatagatgacaagcacaatgccaggtactcagtatctgaaaaaattgaagccattacttctgaagggaaattaagcaagataaatatcaagtagcaagtgacgacattttttaaagagccttcaggtacagaatcatcgcaagtcgtcagtcatctataatcactctctttttacaagcatgccttgaaaactcatttctccttttcatccttcaaaattcagctcaaatgtcacttcctgcaaatgttttactgacatctctggacaggctccatcaccccttctgatgtctcctccagaactttgaacacaccttttactgtagcactttacacattatatttattagaattgcttatttatgtgtctgtgtcttacactaaactaagaattggtttttggtttgctttgcttcatcctttttttcaagcagttaatatacagcctagctgagcacattgcggatgtacaattttttattgttgttgatgaatgtgaatttagttaactaaatgatcacccaggattcaagaaaaaacaagctcattcttactcattttaattctatttttggaatagaattgctttctactgttcttcactgaaatttgaagtgtatttttttttttttgctgtcatatgagttgtatagattttgctgacaaacttaagaatcttaatttataaattgtttctgtggaaaaatacattttaccttctaaaatgttcaagcatacacaaagaaaaaagtggagttttgtccataactagtatatcacattttccaatatctcacatatactatgaaggtgggagggaaaatctcagtactttgcttttcatataaaagcccctctctctctctaattctgtcttccttttccctgatgtctgccttgtccctgcccccggatctttacctcatttagagaattcatctcattctcttcattcttccaaggtttacagtttggttttctgttgtatactttgtggtctaccttgaatctgttattcacctattttcccctgttgaatccagttgttagaggatgagcactatgcacctttcattgttgatttttcacaatggaattttgaagtacaatattgaaatatgggggatattttggttccagataggaatagctcctagttcctcatcatttgccatctgagcacaaagcagacaaggtccaaatttcagccttcacactctcttttctctctttcccatcttgcattcttttctccagagatgaagagaaatgacataatcaggtcaataagacattcgttttcatcttgattgctcttgtctgggtgcttaattatgagatgtcaattattcaacactctaaagagcagtcttctgagcacaaaacgttttagtcgtctggtattaaaaatgcttgttttctgcttttaggctacagtggtggctgtgttgccatgcgaggaaggcatccacttggtcgctgggaagtgaagcactgtcggcactttaaggcaatgtccttgtgcaagcagccagttgaaaatcaggaaaaagcagagtatgaagagagatggccctttcacccctgctatttggactgggagtcagagcctggtctggccagttgcttcaaggtgataccaaggttacatggacattcttaacaggaccaacactattttaatttgatccatgtatcccaaattcctttattccggggccctttttttttccagaacagtgcctgacagacagcaggtgcttaatcaacatttgttgcctgtctctatcctttcaatcatattccaaataatttttaagtaaaaaaaattgacacatcctggtgatattgaaggcttcctcatgaagattgatatctgttaagcagaaataccaggcacagggccaggcacagtgactcacgcctgtaatcccagcactttgggaggccgaggcaggcggctcacttgaagtcaggagttccagaccagcctggccaacatggtgaaatcccatctctactaaaaatacaaaaagtagccaggcatggtggcatgcacctgtagtcccagctacttaggaggctgagacaggagaatggctcgaacccgggaggcagaggttgcagtgagccgagactgcgccatagcactccatcctgggtgacacagcgagtctctatatcaaaaaaaaaaaaaaaggaaagaaaagaaatagcatgcgctaatattaatacctggaaggagggcaccatgctgtggttatcactcctgggggaggactctaaacacctaaccagtttctgcgtaagttcctagctctgacaggaggttttgcacaaacttggctgccagagtatgaatctggtgagacagaattcccacacaacaagatgggcaaagtaactttattacaggttgagtactccttttctgaaatgcttggaaccagaagtgctttagatttcagatttgttttttttaatatttgcatcgcacttaccagttgagcatcccaaatctgaaaattcaaactccaaaatgctctaatgagcatttcctttgagcatcttgtcaccgctcaaaaagttttgcattttggagcattttggagtttggatttttggatttgggatgctcaacttgtattcacagataggcagcaagaagcaaccgaagtctaggatccatggtgagccattcccccaaggctcaggaaagcacccccaggaagatggaatcttgtctgcacatgccccactttgcatgacagctgagggctccccaaagcgcttctctcggggttttatatcccaggtgccacctgaatcactgagcaaaagtattacaagacatcctattctaggagggataaggacagttcctccttatctcaggacgttgcactcttggtacactctgcctgagaattgccaagaaaaagaggaagagctgggtcagcaagggtcatctggggacctgtcctcctgcaatattgaggccccagtcaatattgttcatacactaagtgaaggaggtagacactcagagggtgttaaatggtataatttcatattgtttgtaaaccaacaaataaagtttttattattgaatgatacaatattactaataaggatagcttttgcagcttgccagacatgtgaagatcaaacaaattgatgcatacggttgatttgtatgtgtatatatgtgtgtgtgtatgtatgtgtgtgtatatataagtgaagacatttctatttttaaaatcagctttagatcctacatttaaattagttcctacaatcttgtcagaaacacattttttgaaatatgatttttaaaaatgtttggtggttttgtcttggtttattttacaaataggggttcactaaatcttggggaaaagttccccagcatctctgcacaggcagagcagaatgaagacagactctatctctggaactgttgtagcttgtagatggcatgaagcagctgtgaatgtgctcgatttaaattgtacacatgtataatcctacattacattcatagaataataggcccaaaagtggcctcgcccattaataagttaaaccttagagatgagtaaactggggcctgtgaaatgtagtgatttgcccaagatcacgattatttattgacagagttggaataaatgcctggtttaggacttctggtctggtgccttttctactatatatcaccctgatatgtcaacaaatgcatggtgtgtgtgataggcatggtggtaggatttatgagcttatagtgattcgggaagaggttcccagaggaggcaagttttgacatataatttaaaagatggaaaggttgtgctgtggtccacaggacttggaaagctattcattctggtctcagcaagtaagagcctggtgagggctggccacagggtgtacctgtctggcatcagaggctcaggcttagtgccaggcagttaaaaataagaagggtaagaggactgggattgcaagctctgggtcttcagtccctttccccaatcttaaataaagccaacagaagaccttccattcatctggcttcttcctgccaccatgaagacagctgagaagcagcagagattttaggcacagctgaaccactgcactgccagttcaactaagatccaaagactctagaaatagagctaccctaggtcccaggtctaatttctcatttcttgccctgggtcagccagagtaatgatcaatctgctaattctaatctgtcagaaggcaatctggtgggatggaagtttatggactctggaagcaaggtattgtaggtctaattctagctctgccagtttatagctgtgtgacctaaaattcttaacctctcttggcctgactttatttatctcttgacaaatatttactgagggacaagtacatgccagtcacagaagatttagggtgaaaaaaaattcctcaaaaagctcatttataaaactgagtttattatattctcctcagaaatttgttatgaggataaaaggaactaatagttttatgatgactaggcacattctaattcagtaaatattacttcctcccactagatcaagctctttataaataataatgatgattatgttaatattactgttactttcttgaacagagtttaacaacctgactttatctataacaatgttaatttattttcttttactatacaggtatttcatagtgaaaaagttctgatgaaaagaacatggagagaagctgaagcattttgcgaagaatttggagctcatcttgcaagctttgcccatattgaggaagagaattttgtgaatgagctcttacattcaaaatttaattggtaaatacttgttaattatgaaaaattacagtcaaatattctatctcccagtaatggcttctgagggtgagtatcccaagtagttgtttaaaattcccatatttgtattatgcccaaagccaagaaaaataaatatacatatagttttatgtttatcttgtaccaggttctcatttcataaaacaaagaacaaagtgacaattgtttagatatttgaaatcttttctttgtgcctcaagtcagaactgtagagctttcctgccaaactcaggaattatctaccccaatggttttcaaagtgttgtggaaggatcccaagaatcctggaaccccaggagtatgagagggccacgtaggcagagctcctagttccttccacgcctcaccagagcggctctgaccagctccaccgctaattattttgtatataattggagcctatgtaagattttgtttggaaaaaaaaaaaaaaagagtcccagtaattttttttttaattccaacccaacctcctaagttttcatttgaggaaacaagctttcccttatctgtatccatcttgcaagtttacagaaccttgaattcagtggagttagaaactcaagcttaaattgtaagaactctaaaccgtcttgtgctacctcccaccacataccgtggtcatctgctgtctgcataattccttccagtttcagaatgcttcttatttgggagaaagcccattccattgcagaagcctggtttcaaagagtagttttctaataagccagaaatctgcctcccctcagtttgagctagagcaaatacagatcaaatctactctattttcaaatatttgaagacagtcatcttgtctccttcctgtgagccccccacccccgagtttggcctctcactttggaatgttcttgtcagtcagcctgcattgtgagagtatcttctgtggaaggggcacagttacatgcatagctggttggataattcaatagacatgacaaacaagatcctgcctctgaggatgttgtgatcatcacacctccatgactctgtatatttatttaatgaaaacaaccataataataggtactctgcttcaagctctggaaatctagagtctcaatgaaacactggcctgaatcccagagaaaaatcctgtactattttttcaggaaaattctggcctttcccacaagtttccttgtaggacattcccataaaaagattaacatgcaacatctatcagattattcatcttccacatctacagcaatgaccttaaagctgggagtttttgacatctctccatgtgagtcttgtgcagcattctgcaggggaggaaggagattttatggtcaaatatgtttgcaaaacaatgtacaatcttggagatttgccatgtacattagcatcgtaaagggttctagaaggaagcactttctttgaccacaattcccttttttaagaacacttattgacatcccacagaactgctagtccctacgggaaatgctgacatgaggccatgactcaggaacctggctgctcatcacacttggtcgggacaccttttaatacagagctttctggcctcacaccagagctgctgagtcagactctctgagtctgaagaaaagtttaagaagctttctggctaattggattatcagccaggtgtgaggccgcaaatccaagggataggtgatagtctccattgttcaaagttacattttgcttcattactttagcttcctttaaaacatatttgcatattctgtccttgcattttagtgaggtttgccatatgacaaccacacacacactgcttcccagtttgctttaagatcaaatgtcactgtcatttctgtttatgtaagttctcatgcttgaaatgtctagcagaatttagtcccaagctaaatcatggatcttcaatatctgatcacaaaagtcatataatatgagccaggcacagtgggtcacagcactttgggacaccaaggtgggaggaacacttaaggccaggaattcaagatcagcctaggcagcgtagtgagactcagtttctacaaaaaaatttttcaaaattagctgggtgtggtggccacacctgtagtcccagcaaaacctagttcaaagttacagtgaggtatgattgtgccactgcactccagcctgggcaacagagcgagaaccgtctttaaataaaatatttaaaaattcttgactgggtgcagtgacccacacctgtaatcccagcactttgagaggccaaggcagattgcttgagcccaggagttagagaacagcctgggcaacatggtgaaaccccatctctaccaaaaagtacaaaaaaattagccaggtgtagtggcacacatctgtagtcccagctactcaggagactgaggtgggagtatcaattgagcctgggaagaggaggttgcagtgagccaagattgtgtgctactatactccaacctgggcgacagtgtgaccctgtctcaaaaaaaaaattatcaataactgtgtatgtttcagtttattcccagactaccagagaattcagtcaaatctgatgcttaattatagcaaacataccagatctcatagttagcaggtatagcaggtatgctgcttttccttcctatggcactgcttttctatttctattttattaatcagacacacacacacacacacacacacacacgtatgcacatacatgtgtgtttattaaatattgtacaatttcaggaaactgatgaagagaaagtaaataccatttcatcttccaggagccagtatatagcaggaaagacatagaactctgaattcagtgaggaaagaaaaaggtcacaacaccaggagagtgacatggattttcagcctatgccatcgagattaatgtgcttggcttaaactgaaggtggccattctcaccttctcccagccttaaatgaaagttagtatcatcatgacaatgtccaaccgggcatcagtgatctcttggatttctaagctgaatttgaatttaatttgtgtcatccaggcagagtagctgacatatccgagaaggaattccttgcttctctgcacaaaggaaaataaagtatctgtcctgacatctgaatattttaaatctttgattcttcaaaattattctcagaaaattatcttagtgagatggttcattgcacaggtaggctttattactcgatttattgagtattctgtggacacatttgtactctgcctcatagaagggaaggtgattctctgtggagcttctcaccaagtataaaccaatggtgacaactgaagttaatgaaccatggctcagggtgactggctttagaattatttgtgttgatatctgaaaaaaacccaaaacctactgtgtaccttttattcagtgaagatgatggtggttgactttcagagaatacatgaatgtttaacaaaagaacaacaaatcaaagcatagtaaagtagaataaatagtatagtgaagtagcaaacacacagtaaagtagtgaaaggtcctcttggctagagatgttccaaagtttcttaccaattttcttttcatgtgttcttgtcctgactgaaaggctttgctattcctgatgagaaactcatgttctcaataaaagctgacttttacccacctgtatatcacctgtgagcaaaccacacaaaccaagagtaatagaatgtgaggcttattcttctctcagttcatgtcacagcacagggttttgcacatttaaaatgttcaatgcttgttgacttgatcaatcctgccagtagcatcagctgtttcctgcatacataaatattttaaaatattttttcttttattattattatactttaagttttagggtacatgtgcacaatatgcaggttagttacatgtgtatacatgtgccatgctggtattttttgaacctttcacataatgctgtaaatttgatgggaaaggcaaagcttttgtttcttctctttacaggacagaagaaaggcagttctggattggatttaataaaagaaacccactgaatgccggctcatgggagtggtctgatagaactcctgtaagtcttttcaaactggagaaaagggatggattcaaaacaagtgggcctgggaccacttggtaaaccaaccaagagaacctagaaatgatggccagagctcccatgacaaaactgcaccagaccttagtaccaggagaattatttggcaaggtcctgagaaatctttgctagccatattgttctgaggccattgtacaatttcagcctgaaaaagtatcaaaaacctccaaaaagtccccccaaaccatctcccatatgaagtctctctggcagagaagcagctattctttaaaataacacaagactccctttaccctatacctccctatcctgcatatcacctgattatctgagtatgggaaccttgtccatgtcataatgaaatgaagattattttggagaatgatttttcatttatctcactctgaaaggacagtaatgcaagttttagaaatatcaccttctagagcaagttattccagaaggaaaaaaaaagtcttggttttcattcattcccatacttgcaaacctctatgaaggacacagagaactcactattgtatttttttccagttgcaatgggtaattctcacatttttctcaaaatgacagggaaaaaactgaagtagtatcctagattgaagtgggatccatcctacggcacatgaaaaatcacattattcactttcacctgtgaaatggggagactcctaagagcctgcagtgagaatttaatgcaactgctgtttattgagtccttatactgttccaagcgctgagctgaatgcactcctacatgatctcatttcatccttacaataactcagtgccatgggtattagaatgattaagtggcttgcctaaaatatataggagagccaggatttgcacacaggttgtctgactccaaagtcacaatgttataatatctcatgattagcaaaatatcagtagccaaactttgaagtagtaaagaacaatagagaaagccccgtaccaagatggttttcaaatttatgtcaaggaagaggtttatagaagagagtaggaagagattttaaaggtcattcagccccactaatccatttttctgataaagaaaccaaggctcagaaaacagaaaaggcatagcagggtcaacttactccataaatggcagccactacatgagacagctgggtggttcaagtcaatgtagcactcgaaaaagaaatgtgacacatagaagttgagaacactttcttttgttttagtataacaaactcattagtaataggagaggaacagacaatctgggtcagaataaattagataaggccatgaagcagtggccgagcttctcactaatatctgctggacaaaatgaattcaaatcacaccattttctgaacctgaggctatatatattttagatagatgaattattacgtgacagtgtacatgtttgaggaggaatataaaggattttaaaacatcctttttttccccaaatttttaccccaattttacttgtggtacatccattcttctgtgagatagtcattaaataattgagaaggttgattctttaatacccccgtaatgtgaattatatgagttatgtggtcactcatggaaagtgacctgatagattcctgattaaagctagctatagcttagaatttagttattagagacaaaaaacttagcatatgttcaaagtaatcaaaatcaaagttaataccaagatctggcacacccttgagtccctaagtttacccaggattccaaggctagaaaattttcccagttagaaaaatgtgcaaattcagaccaaagcttgcatttgatttgttccttctggagaaaggaatagcatacctttttttaatttttattttatttatttattttttttgagacggagtcttgctctgtcacccaggctggagtgcagtggtgggatttcggctcactgcaagctctgcttcctgggtccacgccattctcccgagtagctgggactacaggtgcccaccaccacaaccagctaattttttgtttttgtatttttagtagagatggggtttcaccgtgttagccaggatggtctcaatctcctgagcttgtgatctgcccaccttggcctcccaaagtgctgggattacaggcatgagccaccgtgcctggccttttgttttcttgtttttgtttttgttttttaaaaaggcatctttaagaaaaaaatgctaaatattgattagcttgttcttcacaaatgtgaaacaaccttcaactagaatgacatccagacatttctgaagcttcctggagtagcctataatgcttatgtacagggatgccctttttgatcttttgaaactttgtggggggatcatcattaaggaataatgaacttcatctgctgcaggttgtctcttcgtttttagacaacacttattttggagaagatgcaagaaactgtgctgtttataaggcaaacaaaacattgctgcccttacactgtggttccaaacgtgaatggatatgcaaaatcccaagaggtaaaaatagtagtaagatctttgctatatgtttgatttctaataatctctagtactttcccaatttaaacaccccaaaccacaatatcaacaaattgcatgataaaataaattacactactttagcaaaaaatgtttctataggaaatgggaaaaggcgacaccaatgcaggatgccaagttagttcattgggaactaaggtaaccagctaatattgcagaatatttatagtgcaagtatagtcggggaaaaatgtcactttgacattacagagcaaatggaattacttgcacaatgagtaagtggaaacacctgggacagtgtgtggcacacagtggcctcagcaagtgctcatgtccttccttctttaattagaagcctctctggagcttcctcttcaagtgtgagaactcaccatatattccaaacagcacaatgtacctgttttaaagtgatgttttaaaagatgaaggacaaaatagtgtgtttagagctgaagtaattcacagacaatgcacttgagaagcaagatcagtcaaagtgatttgctttcactttgcagatgtgaaacccaagattccgttctggtaccagtacggtaagaacgactctggcagctcttgaatttctaattattaatatataccatataagtgctattatataccattaatgtgttgttacatttctcaaatcgagcctctcttttcttgtgtcaacctagagctaatttgttcaaattaataattaataaatgtagtcatttaatatgattaaggactagtatcatcaatcattttcatgacatgcgattttagaatatgtacctatccccgaccttttaatactagtgaaggtatcttgtaagagatagaccaaagaaaaaaagcaagttatatatctatttatgtgcatatgtgtctgtgtgtgtgtgttcaaattcctgtgtgtgtgtatacaattatttttaatgttgagtgaccaaatctcaaatttggggtcaatcctagcatacctatttatcatttcagcattattttcactgtttctttttcagatgtaccctggctcttttatcaggatgcagaatacctttttcatacctttgcctcagaatggttgaactttgagtttgtctgtagctggctgcacagtgatcttctcacaattcattctgcacatgagcaagaattcatccacagcaaaataaaagcggtacttgaacataactcaccacgaaaaattcagagtttagcaccttcttttgcccttgggagggagggagggatagttttttcgatttgacttcggatatttatttaaacttcagtaaaagccatagatttcagtaaagccatagatttttgagaatttttttcctattatagagattaagagaaaataatggaggtacaggtttactgtattgctcagtcatttcccttctcttcattctttgttagcaacaatggtgagcacgtcgagattgtttcatgaggttcattcgatcatttaatcactggtagaactggggttttaccagtgattaaaaaagacccaaattcctatcttcatggagtttatattctcgtctgggaagaaagaccataatcaattcgagtaaatagaattatataatatattagaaaaaataagtggataaatgccacagaggaaaattaagctcaaatgagggatgaggaatacctgggggggtgcctggcagttttaaactttcaaatcttacaagagtacattatttttaagtttgtaaagactaatatacagaaaatagtaaggagtagttttctatttcaacttaaagtagagaaaggctacttaattccttgcagaactaagctagtaagaaagaaacatgtaagacctattaaataataaactggcaaagaatagtgtactttttcagtgtgttccttcaataagcattcattatcaagtatgtgccaggcactgggatatttgtcaaagatgcaaaaatgtatgagatacagtctctgtttttaaaaaggctagatatatatactttaaaacatcatgttgtatacaataaatacatacaattttatttttcaatttttaaaacataaatttaaaaactaaagctggaagtgatatgatgtagtaaatagaaagggcacagaaagtgcaaattacaatgggggcatgaaggcgggaaatcctcactcccctttcccttggaagctttgaaagcaagaaaaagccattttcttttcctgtaatttaatcatatttcatgatcttcaggaatcctttctaactctatcatctttttatatctctgtaagttgactataaaatgaagccctgtattaaagcatcctaggcttgagaaagaaatgtctttcctcacagttcatggggatttactgtctctatatcttgtctgttgcacatacagcccatgaggtacaagcaggtcaggactcctgctacattctgatgaagaagccgagaaaaagagaagttagatgacaatcacatggtcccacagacactcagttgcagaacaaccactagatgtggaattttccccatcataaatttgtacactattttgtcacccttccactcttacgaatggaacactcaagccaaaaccataatgttcaatatgagcatgttcaattctataccatgatgtcggaaaatacacatttctttagccagacaccatactcctcacctcagagggcaataacaagagaccagatgaatggctgaaaactaatccatacgcatgcaaagtatacaacccaaaaagagctgatatttggctatacttaccataactgtttcaggtactatgataagtactaaaatgtaatcttcccaagaaccccctgtgggaagtctattattagtacatttttacaggtgagtaggctaagacttcaaagaggttaagcaacttggttacacagcagctaagtggtggaatttggaaagaaacccaggccatcttatttatccagtcatttaaaaaccctacacggtgctgcctgtgacagtggaacagcagtgtcagggcatgtaagagcacaacgtcttcattacatcaaaagctagttccaaaatcctccccaaaacatggctgccagcttcgtctcagacatgaacaatgaagggcttctttgatctttccaacagagcttagctctgctgggaacttctgtagatcttctgtcttcacctttcctcttaattcatctcctaatctttggaagttgggaagccaatggggatggcgtagataatgcctcccatggaagggaagggcgaaaccccacaggctgagcagtttgagtcatcatagccactgccatgatctagttgaggattctgacctcaaatcagacaaactttatggtgccttatatggcaaaattgtcacctggcctatgaccacgttgatgtagaatgccccatcagtttcatgggtaaggtgctaactaatctccccactgtgctgcaaaagaaagttatgggaaggtataggatttgaatactgagaacagggccaggggactgtcctagtcttttcaggctgctataaaaaaacactatagactacgcagcttacaaacaacagaaaattattgctcacagtcctggaggctggaaactcaagatctaggcattggcagatttgatgtctggtgaatgcccacttcctggttcatatgtatccttacatagtggaagaggcaaaggagctctccaaggtccccttttaagggcactaatcccattcatgagacacccccaccccccaccctcatgaccttatcatctgccatctgccttgtaatatatcaccttgagagttaggatttcaacaatgtaaattttagggggacacaaacatttagtctgtagtggggtccaaggggaaaggatatcaaattagaaagaagaaagctgttgctttccaaaaaattcttatttctgcataatttgtgcctaccttgggcacttattgttggtggtggtgatagtggtgttcacattttgtaagaaagaaaccccacacctaagaacgtcctgctggaatgggtcaatccagaagttacttcattccaggatgaggagcaagatgtgtagaggtgattccactcacttctgtctcacatttatcttataaatgtaggaagagtacaaataagtaattaaatatttttaaaattacgtatgtgctttgtgtagcttccctaagaagagcagtgattagaattgtgaaaaacaaaaataacagttagttgcagtgtcaaaaaaattaattatgaacaagcaagctagatacagtttaaaaatctgaagcaaataaaaattttaataaaatgtttccatcttggaaaaagaatgtcaatattttctctcccactctttgagtaacagaagaccataaagcatgattagagtgaatttattttttgagccatcttgataatcacattaatgctgaaaaaacgctgcaagcactttaggagttgtttgacacaaactactagctaattagtctgcttatctgacatttttacactgttatgcagtattgtcattttgaaatggcaatttaccattattattaaatttttatttctaaatgcttctcaaaatacatatcaaatctattagtcctcctccaaaatatcatttgtcatccttgatgggaacattttaaaagatgacaggttgttcttccttatattgctttatggattaatgtagtgactgtcactgtggggttttgtttgtttttggtaaatgctgtttccatatgatgctaactataatggctgtttgtaaataccaaaacatagttgatgttataaaatgcatgttcatatgacattttttaagccctgagcttacttctctatcacatttctttatgcaaacacatgttaataagtcttctattgttgtggccttcttaagctaaaatttcaaacatccattttcacattggatgttccattctgggtatcttctagcatctcctatgaagttcagttctgtgccatatcacaacaggttgtgatgtgccatgtggaggttaccacgccataattgaggtggtaataaatatgccacttaggatgcagcagttataatttctctttagaggtccttaattggggcagtgaacaatccaggccatgatttccagtcccgtggcacatgaaacctctttagattgaatgaaattgttgtggttcccccactgagttaacagccagtctcagtggacccattccaacgtctgacaatgggaatctgaattcagcctgtaagaacatgtccacgaaacaacacctcagggatacaaaattacagttgttccatcttgcattattctcaaattgctgatatgacaaatagccatgctgtttacagaataaaaatacctgtttataaattagattgttagagggctattgggttctgttgtatggagagctgaaattcctatggaaaaataatgtatcttaaaatttcttctgaagtctttacagaagaaacgagagtacaaatttaaatatataatgccttcaaattaacaggattttagcatataaaaattaacttacagttcagcacacaacacacacacacacacccccattaagtatactgatttacaggtcttagaaaaacccttacttcctcttcctcttttatagttaaagagggaatttcaatttcctgggtcataagtcagtacatctgccctaatgtgtgtgtgtgtgtatgtgtgtgtgtgtgcgcgcacacacgtgtgcacatgcatgcacatagtgctttaattttatactttattgtacttaggtccaagtgattaatagtggtataaaattagtaaaatgtaaaaggataattttctttttgttgttgttgttcaagtcttctatttccttactaatttttactacctttattctgaacactacaacattactaatacaatcttagattaagtggtttttttattggtgataactatatcactctgttaacatagaatttataatctactaaaattccaattttttgttatacagtttaattttatattaaaaagtacatattttgaaatgtgtccatgttgacacatataaatctggttcctttttttattattatactttaagttctgggatacatgtgcagaacatgcaggtttgttacataggtatacatatgccatggtagtttgctgtacccatcaacctgtcatctacgttaggtatttcccctaatgctatccctcccccagccccccaccccccgacaggccccagtgtgtgatgttcccctccctgtgtccatgtgttctcattgttcagctcccacttatgagtgagaacatgcggtgtttggttttctgttcatgtgttagtttgctgagattgatggtttccagcttcatccatgtccctgcaaaggacatgaactcatcaaaaggataattttctagttgtcaaacactgggcactctgtagtattcttttgtcctatattgtgtctctctatttgaatgggaaggaaagcttatactgcttaaagcttagcaatcagactaatacctaaaatcagtatctttatactaatgatgccttgataccttgaattgtttttcaaatacatgtgacatatgcaatgaattataaatcactgagagggtaaataactgagaggatgagccaataattttttgtcagaaaatgaattcattttctaatattactttttaaaaccttcttagagagttagaaacattacttttcaagttgtatgaaactaaaattattttccatgtttgattccagtttttcttcgtaatggggggaatattttaggataatgaagtttcaggttttctcaagatgctaggccttagtgtattcttccttagataattgggtaaaatactgaagaatagaaagctattagcagcaaccccattactcttaatagtgaaaaaggaaaacaagtagaataaatgctgactttttttctttcaatagctatcaaagtatggtgcaagttggtggattggacttcaagaagaaagagccaatgatgaatttcggtatgaacctagattcatttgcatttaattttgtttgacaggttttatttgcagaatgattagattcaattttagtgatcaatttgttgaatacccttcaaacattaacttataaattttcacttctctaaccaaagacatgagtgttttttaaagaatatgcttatgaaaccatcccgacaatctagccataaacatatccatcacctccaaaagctttctttcctgctctattcatttatttatttattcactaattcattcatttttgtgatgagaactcttaacataaaatctaccctcttagctgggcgcggtggttcacacctgtaatcccagtactttgggaggccaaggagggcggatcgcctgaggtcaggagttcaagaccagcctggccaacatggagaaactctctctctactaaaaatacaaaaattagctgggcgtggtggtgcgcacctgtagacccagctacttgggggggctaaggtaggagaatcacttgaacccgtgaggcagaggctgccgtgagccgagatcgtgccactgtactcagcctgggtgacagagagagactccatctcaaaaaaaatctaccaccttagaaaaattttaagtatatgatacaatattgttaactataggtactatgctacatatgagtatattttttaaatttaatagaatattatatcttcaatccctacctcagaactctaagaatgatgttggagactggacatgcagaatgagagaagaccttaacatttttaatcttcccacagctggagagatggaacaccagtgatataccagaactgggacacaggaagagaaagaactgtgaataatcagagccagagatgtggctttatttcttctataacaggttattttacttacccatttttgggtttataatacaaactgataattttcaggaggcttaaagtcttttccttgcatcatttccatgagaagtttctgtttatttctcttttcagttgacgtgttcagttttgtctgccataaggcttaaggatggccatttttttctgttcaatccatgcattcatgttcttggaaataatttacatctgaataagtccttcctcataaatcaagacagcaccagaaatgggcccaatgaaactttaaagaaatatatgcctgacaaatacttttttctatggtatttcaatggaagcactttttaaaaaaatctattcctatatccaatttataatgggccagaactttaacctctgtgaaatttacttccattttcctatttaataaatgttttgattcaagtcagtattcttttttcttttactacctgtcatcaattgctgcttgctttagaatggcaactgtttgcaagttggatttagaagcacatttaggttgaagattggttttttaaattctcctcatcagtgcagtgtagttaggttgattgtccactcattcctcttctttctaaccaataaaagataatgatacccattactctaacagattcataactaacctgtgccccaggccaggagagggataaacacagaaaataattttgggtgtgagggcctctgcagagagttaggaaaggaaaatccgtgtggttaatcagcctgcttttaccagcaggtgtcacaacagcctacagaaaggactgttttgagcgtctgggagaatagcagctaatctgcattgaaaatagcattccagcccttccttcaaaatgccaacatcttttgggctcatattcctgatctagaaaactgagcctgcccttgcaattggcatgcattctgccctgttctggaatttatgacttggatgccaataaaatgcattctataatccttattctgaaaatatagctcttctaaattaaaaaaaaaaaaaagcagttagtttgtcggaggctaaggatttgaggatatttcttactgaagacatgtctatatgtgagtctggtttacttaaggatcagtattaaatgctgttttcttggaagttcttgagttaatttttctaaattattatattttctaaagaattataaagtagaaattatctactgttttagaatctttttcctctctgtacattgaaattgaacattttaaaatgaaattgttaccctacaaagtattcttttgctacacaagtcaaatattcttaagattttaatcagttctatgattcaaattgcagtatttatttagatttttttaatttgcaaaatttttacattcttaaattaaaattactgagttggccttgcccagttagctgttgtccctagagaaatctaagatcagtagtttagttcagtttctagattttaaaaaataaattatgaaaaaccatagcctcataaaaatagtgatcaatagagaatgccttcaaagaatcgccattgttcctaagccatttctaacccattttctcctccaggactctggggtagtgaagagtgttcagtttctatgcctagtatctgtaagcgaaaaaaggtttggctcatagagaaaaagaaagatacaccaaaacaacatggaacgtgtcccaaaggatggctatattttaactataaggtaagcttgtttttcaaaagttgcctttgtttctcttttgtagacactaattttggaaagtgttcaaaaagtgaaagtggcttttgaaagctgtgagttgtccataggacctggaatttttttgtcacaactttcaagaaatttgagttttccatttagtaacaaatcttttggaacaaaagatttttgtcaaaaacagcctggacactgcccctcgtttctatactcagttttactgttggcatagtcatttattgtgctgtatgaatgtttcattaggtgtaacatatgtatgtatatgtatgtatgcatgtgtgtgtgcatatgcatgtgtgtgtgtgctcatgtgcgtgcgtgtgtgtgcacgtgtatgtatgtgcctgcatgcctgtgtgtctaggttctgctcccaaataagctgtaaatttcagaggacccagactccatctcctactcttgtgttttccctgcctggagccggcatagagctctgcccactagtgaattgagggactaataacttagcttggtcaatgtcatcttaagcctcataaagctggtgcttccatgcagatttgaattaagaaaaaaaaaattgccagtggggatattttaaaccagatttattatttctgatgctgccttcaattaaggcctagtctccctccactcttcatattttataataaaataactttataggccttaggtggaagtaattaaaatgcatcccaaattataattgtttaactcttagaaaattaaaaaacccaaactgtgtcatcatttcatatgctaatatgaaattcctcttcaattgtggacagccaatttttaatctaagtgttcagttatattggcagggctttctctcctttgtgatcttcctcccattgttaatttgagaaatgaggccacttggatttttcacacattcattgagtacccaccagacatttggcactgacttttaaatttttttaatatctggtaaatacacacaatatagaattcaccattctagccatttttgtctactgtttactagtgttaagtatcacatactcacactgtcattcaacaaatctccagaccttttccatcttgcaaaactgaaactgtacccattaaacgactccctgttcttcctactctgaaccccttggcaactgctgttctactttctgtgtctttgaaattgactaatttagatacctcatgtaagtggaatcagacagtatttgcctttttgtgactggcttatttcagttagcataatgtcctcaaggttcacccacactggcatgcgacaggacttccttttgacggttggacaatattccattgtatggatatactacattttgtttatccagtcatccattggtggacatttgagttacgtccccccttagctaattgattgtatgtttatttcttatatcactgaattttaaaaatatatagaattactatcctcattttacatatgagaagacagatgctaacaaaattgtgtgacttttctgaaacttcacagtgaatacgcatcaggccaagacgcactttttgttttctgaccctgagtctggtggtcttgcccctttcctatgcctgccacttcacgttggcacttaaggactgccactccagaaatgcaaattaaaacaacaatgagtgatttgccactgcacagctactagaacggcccaaatccagagcactgacaacactacatgctggcaaggaggccgaacaacaggagctctcattcactcctggtgggaatgcagaatggtacggccactgtgggagacagtttggcagtttcttacaaaactaaacatacttttaccatttgatccagcaatcacactccttggtatttacccaaaggagttgaaaacttatgtatatgtaaaaacctgtccatgaatatttataacatctttattcttaattgccaaaacttggaagcaatcaagatgtccctagtaggtgaataaataaactggtacaaccacacaatggaatattactcagtgctaaaaagaaattagctatcaagcctttaaaacacatggaggaaacttaaattcatattactaagtgaaagaagccaatctgaaaagcctacaatactgtatgattccaactatatgacattctggaaaagacaaaactagagagacagtaaaaagatcagtggttgccaggtgttgcagggagggaaggatgaagttgtggaagattcttagggcagtgaaaattctctgtatgatagcacaatggtggatgcatgtcactagacatttgtacaaactcatagaatgtacaacacaaagagtgaaccctaatgtaaactatggactttgggtggttatgatgtgttaatgcaggttcatcgattgtaacagatgtaccattctggggtgatggggcatgtgataatgcgggaggctgtgtatgtgtggatcaggtgggaaatctctgtaccttcctggttttttttgagatggactctcagtctgtcactcaggctgaagtgcagtgacatgatctcccctcactgcaacctttatctcccaggttcaagtgattctcttgcctcagcctcccaggtagctggggttacaggtgcctgccaccacgcctgactaatttttgtatttttagtagaaacggggtttcatcatgccaggctggtctcaaactcctgacctcaggtgatccgcccgccttggtctcccaaagttgtaccttcctcttaactttgctgtgaacctaaaactgctctttaaaaaatgaagtatttaataatttttttttaaaaaaaagggttgccatgtcagcttagccctatgacacagtgagctcagtggcaccatgagatattttctagaatagtataatttactctaaaactttactatagtaatgaggtacactattttttaatcattgatactttctgtatacttcctattttctcaaactataaaatctttctaccaggtataaattattttcacattttagtatgagaaacttgtagctaatattcaataagacactgagtgttactaagtcttttattaaaacctttggcaattagttttttaaagcatctttatggtcctaaataatgtaacataacatttgccattttaaccattattgagtgtacaattcaatggcattaattacatgcacaatgttatacaaccatcatctctatttccaaaacattctcactatcccaaacagaaactctgtaaccattaagcactaacttcctgttccccatcccctggtaacctctaatctattctctatccctgtgaatgtgcctattctagatatttcatattagcgaactcatacaatatttgtccttgtgtctggcctattcgcatgatgttttcaaggttcatttgtgctttagcatatatcaaaattgccttccttcttgtggctgaataatattcctgtgtggcacgggcgtgtgtgtgtgtgtgaatattgcatattttgtttattcattcatctgttgatgcgcacttgggttgttttcaccttttgactattgtgaataatgcttcaatgagcattggtgtgtaagtctctgtttgagtccctgttttcaattcttttgaatgtatacctacgaatagaattgctgggtcatatggtaactcagtagttagctttttgaggaactgacaaatgttcttccacagcgaccaaaccattttacaatcctgctagccgtgtgtgagggtttcaatttctccacatctttgccaactctggctattatatagccatcctagaacacgttaggtgttatttcattgtgatttcgatttgcatttctctattatctgatgaagttgagcatcgtttcatgtgcttgttagccatttgtttatcttctttggaaaaatgtctattaaagtcctttgtccatttttaaattggatcatttgcctttttattgttgagttataggaattccttatatattctaaatattaaaccccatccaatatgtgatttataaatattttcagtcattctgtaggttgtcttttaactttcttgataatgtcctttgatgcacaaaagtttttaattttgatgaaacccagttatctactttttcttccgtcacttgtgcttttggtatcatacttaagaattcactgccaaatccaaggtaatgaagatttgcccctgtgtgttcgtctaagagcttcatggttttagcatttatatttaggttgttgatacattttgaattcactccagtatgtgacaattagtttttcacaactgttagaacaagtttatcctggcatggtctctagggaacaggcataaaggaatgcctagctaatctccaaatcacatttctggtacagatagtgaacaacccaaaagcatgaacacaactgtcctagttactaactcatgcctcctctcatgtgtaaaagaggatttttttatatactttaagttctggggtacatgtgtagaacatgcaattttgttacatagatatacacgtgccatggtggtttgctgcacccatcaacccgtcacctacattaggtattgctcctaatgttatccctcccctaggcccccagtccccaacaggccctggtgtgtgatgttcccctccctatgtccatgtgttctcattgttagctcccacttatgagtgagaacatgtggtgtttggttttctgttcctgtgttagtttgctgagaatgatggtttccagcttcatccatgtccctgcaaaggacatgaactcatccttttttatggctgcatagtattccatggtgtttatgtgccacattttctttatccagtctatcattgatggacatttgggttggttccaagtctttgctattgtgaatagtgctgcaataaacaaacatgtgcatgtgtctttatagcagcatgatttataatcctttgggtatatacccagtaatgggattgctgggtcaaatggtatttctagttctagatccttggggaatcaccacactgtgttccacaatggtttaactaatttacactcccaccaacagtgtaaaagtgttcatatttctccacatactctccagcatctgttgtttcctgactttttaatgatcgccattctaactggcctgatgtggtatctcattgtgggtttgatttgcatttctctaatgacaagtgatgatgagtattttttcatatttctgttgactgcataatgtcttcttttgagaagtgtctgttcatctccttggcccactttttgatggggttgtttgtttttttcttgtaaatttgtttaagttctttgtagattctggatattagacctttgtcagatggatagattgcaaaaattttctcccattctgtaggttgcctgtttattctgatgatagtttcttttgctgtgcagaagctctttaatttaattagatcccatttgtctattttggcttttgttgccattgcttttggtgttttaggcatgaagtctttgctcatgcctatgtcctgaatggtattgcccaggttttcttctaggattaaaagaggatattttaaggaaattaatgacaagtcaaatccttagcatttgataaataattcttagaaacctggaatagttgtttctggttcagccttttgctattatccttcccccaaacttgatttttacccacacagttcacctccatcccatgtgtcctcctgtacacacgtagagagtgtgtatctatgggaatggtggcagtgatggtggagcagacccagggcaaaagagcaagtgaatgcttcccatgaaaggaatagagaggggaataaatatgtgcatgagaatggcggggaggggaggcgccttctgaagctagccctggggcatgattaaaacaccctcatgtagctcagagttataaaaaaaaattattgataactaacagctagatcagtagttttcagccctggtcaaatatttagaatcagcaggtgagctttttaaaaacatcaaagtgcaggagacgtcctgaagattctgatttagctgatctgcatgggatccaggcatccgtatttttttaaagctccctcagttattctaatgtgtggccaatatttacccagcaattcaacagtcatagttccacaactctttcttcaaggcattaggagcatttgattacaaaggatatcatcacagcaggcttcataagtaggtggcaattcacctggcacaatgtcagagtcaccatgcatgtctccccacccacagtgccttctcctgcgcattaatgcctaaaattccaccactggagtttctctcctttgtctcaacactttcctttatttttaaaagggaaatatttttgagattgcctcatctgtcatcaacatcttgaaacaagtaagtttatcagattattagaaaaactgttaataggagagttgatagctgagagcggtgggatggtttttccctattaacaaataaagctacagaaggaaaactgggagataacaatgatggaccttctttacttcacaattctgaaatgagttccaatatattatgtcccattaaactttgcttattgtttgtgaatttcctaggactaatttttattggttatttctaaggaaaaaaatcccactttgttggcaaattaagtgggttttaaaactgagatacacagaaattaagcatcttttctaatgtctcataaatagttttctctgtgtttgacaatgtaacagaggtttgaccaggggtttacccaggaagaatgagtcatctaagatacttgtcccagcagatctgtgggaggaagaaattctaagtgtgtgtgtgtgattaactcttgtgcttctacttacatatttttattcaagacctggattgagtggtaatggctgctttgcactgtctagtttgggattagtcaatatttgattttgtgcataacatagttttttcttaaaaatactctcacctctttttggaatttattcaaattggagcacttcattcattcattcatttactatctcgatgtcgggaattcagtggtgaggaaaaacagacacagccccttctcttttggtgcttacacactagagggagaacaaacattagtaaatcgatcaggaaaatggctgtgtaatttaaaactgtgctgtacgtgatgaaggaaagttatgtggttctagaaaagtgtatagccagaggacctgactgaagtggtcagaaaggcagggaacattaaaaatagggggagctgcatgtgctaaggtcctgcagcaaggtgggagtatgacatttaagaaactaaaggaaacatagagaactagagtggccaaaggtgagacaaaagaagtggaaagggtgataccgtgttggacttctggcctctatcctaagagcagtgggaaacccttgatgggtttaaaactaaagaaggacgtgaccaggaccaaattttaaaaagttactctagatgtagtgccaaggatatatggaagaagggcaagggtgagaaaggtaagagcagttaggaagctattgctgtagtgcaggcaagagactggtaggttgggctaagatagtggtggcagagaccatgaggcagtgggaatggggatgggtgagggggctttttgggaaatgagatgtccaaatggtatggctgttggggagatggagtgggaaggtaaggatgcctctgaggtttcaggcttattgtatgtgtataagtgcatgcagaccgtgccattcattgtgagtaggaacactgggaaaggaccaagtttggagggaactgaatttcatttccaaatattgagctagaaatgattttgagacaaaaaagaattttatattgaaaacccatttagaatacagtaggaccccattaattcacagtaataatcagagatgcattaaacttgatcacattttgcaaattagtaagtaaacaattttaaattaaggatgctgtacttcatcttgctgctttgccttaattattaatgacacaatttcggagtgtgttagtaaatatgttatatttttagaaacaatgaagtcgtggtaattgcaggccacacttccgtagtcaagctagtaaatcctggctgaggcaaacatagaggaagcagaggagatgtttttctggagagatttattgagctaactgaaccaatgaggttcattggtatttatgaatggttcattagtgtaactatctgaacacaaggtgaattcacattaaatgataagacttcccaataattaatatgtgccactctttagaatttgtaattagaggaaagaggcaaaatgaaaggaaatagataaaaggatagttgttataaaattaaactccttgaaagccaattcagtttatttgtgaagcaaacaagacaaaaaggaccagaagaattgaaaatgtattttctctcttagttggcaactcaacctcaagctagttcagtgtttctggtttttatcctaagagtagtggaaaattcctgaagggtttaaactaaagggtgacatgatcaggactgagttttaaaaagaattaccttacactattgacatttggggtcagataattctttcttttgaaagactgacctgacctgtgctttgcaaatggttagcagcatctttgtctctacccattagttgccaatagcaatcccctccccaactgtaacagtgaaaaatatctgcaggcattatcaaaatataccctgaggggcaaaattgtcctgttggagaaccactgagctaaatttagaatgactgacaatgtcatttgacaaccattttagggtctgttgtcttttattttgcttaataaatgtttactaggggccttctctggtgtgatgttcaaagaggagtaagacttagtctctctgcttttaaggggtgtatgatggtggggaaggggtggagaactgaaaaatttggaaattaaagaatgatggggaaagatattgtattagaccagtcttgcatttctataaaggaatacctgagactgggtaactgatgaagaaaataggtttattttgacttacagttctgcaggctgtacaagaagcatggtgccggcacctgctactggtgagggcctcagggagcttacaatcatggcagaagataacagggaaccagcatgtcacatggcaagagcaagcacaagagggtgaggtgagaggaggttccagacttttaaacaatcagatctcgcatgaactgagaactcattgatcacctaggggatggtcctaagccttcaagagggatctgccccatgatccaatcacctcccaccaggcctcaccttcaacactgggaattacatttcaacatgagagttggagggaacagacatccaaactatatcagatatcatttcaaaataaggtaggaaaggatgctttttcaagtgtaggtttccacgctaacctagaattatcctgtagtggcgagatcttaggatctgatctatcaatgactagggttatctgtgttcattgatgagagaattgattatgagagaagaatccccagcaagttccagatgaaacatcctttgcataaagtttctcctgacctctctggaattttgcctgatccattataacctttctcttctatcttttcctctcaccaaactccatctgttcctaccaacattcttaaatttcatcgaactttcagggaaaaacaaacaaacttatcttcaaccctgcctgtcctgccaagtatgtatcattccatttctcatcccataagaaagaaacctctgtggcagggcgcagtggctcacacctgtaatcccaactctttgggaggccaaggcagatggatcacaaggtcaagagatcaagaccatcctggccaacatggtgaaaccccatctctactaaaaatacaaaaattagccaggcatggtggtgcgcacctgtagtcccagttactcaggagactgaggtaggagaatcacttgaacccaggaggcagaggttgcagtgagccgagatctgaccactgcactccagcctgggcaacagagcaagactccatctcaaaaaaaatttaaaaagaaaagaaaagaaacctctgccatgatgcagacatgattctctcttgcataacactcaacttttattgccaaattccacaaccttttctgtgttccctctaacattgatggccaaccttccccttcatttctacttcttcccaggtttctttggtcatacccttgctttctgtcccactgggatcatttatttttcttctctggctcttcccaatagacttagtgaccaaatggctgactcaagtatttagtgaatttaaacacctgatgtgtttgactccccattatttctctctcacttaaagtaaggaagtgtgtttgtaaataaaattgaactaagctgttcattgccacccccagaatgtttttgtttttttttttttagattaaatgtgcccatgtaaactttgcaatcagagtggctcctttttaggaagaatactacttttcattgtgctgaaggcactgttctgacatttcacaagacaaaacgcatccctgcttctgttcctgcctgctgcaaatgcaggcaagtcattaactcaccctaaaagctgctcctctttgttttactgtaacacctttggaggaggtgaaagaaaaatgagttctttctgcccaagaaaattataaagaattttcaaagctgatattcagtgtctttgggaaatttttaattcacttagaaagatacagaaatgaatgttttgttttgacattttttgatagtgccttctgctgaatatccccaaagacccaagcagttggaagaactggacgcatgctcaacatttctgtgctgaagaaggggggaccctggtcgccattgaaagtgaggtggagcaaggtagagtactcaagatccaaccaggccaagataaccatttttattcaagtatttattaaaatatcccccccacctatactaacattcccaaatcaacatttaaaatactgtgttgctgatgatacacgagtttgcagtttgacccataggttttatttcatgatatctgtaaaagttagtgtactgcattgcttataaactgctgggttttggagccttgtctctcaccagtagcagtggaaagaataaggacatattcatggcctatatttcaaaatggctaaaaagtatgatctacatgtaattgcatggtatgatttttagatccctttacatttacctacatgcttttatttgatatttaatcaattatatacttcagtttaaatatagcagataaatcctcttttgtttagaaaggtaattaatgaacactggaaattgttttgttaatgatatgatgaaatctcaggttatccagctaatttctgtcaatttaaactaaaacaaaagtgaaagaaactgcattaccttaacaaggataaagtaacaaattcctataaatgattcataattatgttttgctggcatttaaatataatcatagctataaataggatgcagtgattacccaaatgctttctacagtattaaattagataatgtattcctgtttttcagctttcattactatgaatctttttggccagaccaccagtgtgtggataggtttacaaaatgatgattatgaaacatggctaaatggaaagcctgtggtatattctaactggtctccatttgatataataaatgtaagttttaagatttattttttggagatcactttggcaagatattttattcaagatttgtttactaaagctttttttatttcctatattttgtaggtataaatttatattagttttttattaatatattaatttttaatgtaattttatgtgttccattaatataattactttactcatcacaataattgtttattttgtaggttatgaaatgacttgtgaataagtttattaaatgcgaataaaggaataatggtgtcttaattttaaaaataatgtcttaataaaaattttaatgttataataatgctatatgttatcatacttttgataacgtgtattattttaaagattccaagtcacaataccactgaagttcagaaacacattcctctctgtgccttactctcaagtaatcctaattttcatttcactggaaaatggtattttgaagactgtggaaaggaaggctatgggtttgtttgtgaaaaaatgcaaggtaagaaatatttgggtttttattcctttcatttccaaagtccatccttctctttcatgttggttttacacagctgtgtagctaatgtagctaacagtttcctggctaacagtgtcaggcacttcttctttggctttacataagtttagttatttaatctcctctaccctaggcttatgccctttagtgggattctaaggactgccgaggccacttgagtgatgaccaaatttatgtatctatcttagtcatattaaatggctttactgcttcattctgggattatgtatctgttcaggtgatttttaaaggtcactgagaaaatgttgggaaagaatcaaggaaataaaccaactcatatttgctccttttttggaaccctgaaaatggtctctgtggctaaatgtggcatgcagcaatcttctagatctgatgggcagaacccccaaatggtttctgtgtgaaatgccaaagccacactattacaaatagccaacagggtcaatgaatagtgtgaatgcactataactgaccttgagtactataaataaaaacaacaacagctcatgcttttactgaatgctgggtatccctgtccacaccacccaagaaagccatagttggtgtctagagctgtatggaactctgggcagcctagcatatatttatatatatatatatatatacttatttggaataggaattttacttcttaatgtggcatacgtgtgaagtctctaatgttactatcaactcatcctcaaaaaagcagtgccagagaagctccatttctggttctcagttaccacttaaacattatagtggtcaggaactgaaaaaatgatactagatctgtaacagcaagagtaatatgggaacagcagagccttgtagggaaagaaataatatgagcatgccaggtacttacacacttatgagtacctgaccctgtgccttgagtgtatgcgcggtatgccacaaaatcctcaagacagttctatgaagtaggtaaaagtctcccattttacagatgaggaacttgaggcttaaaaacataagtcatccttgctaggcacggtggctcacgccagtaatcctagcctttgggggaccaaggcgggtggattgactgagctcaggagttcaagaccagcctgagcaacatggtgaaaccccgtctctactaaaatacaaaaaattagccgggcgtggtggcaggtgcctgtagtcctagttactagggaggctgaggcatgagaatcgcttgaacccgggaggcggaggttgcagtgagccgagatcgcaccactgcattccagcctgggctacagagtgagactctgtctccaggaaaacaaaacaaaacaaaacaaaaataacacactcaaggtgtctcagttaaacacaatgattctattccactaccttgatgttgatttattcttggaatgtgccctctgatcactttctctctttggtatttttgggactaacagtgtagattttcctttagagatagtacagaatagtggtgattgagagcataggcaccggagtgcctaccacacatgggttcccacccttctttgtagataagcttcagtcaaggttacttatcttctgtgatcatgatttctgcatctgcaaaatgtggtaatagccatctcacacactttatgtatgtataacacttagcatacttctagcatatatttaacaaacgatatagttttttctattatttccagaaagtattgttcaactacactagttattgtagccaacaataaatattcaagttctgctcctcttctctgtttgtcagatacatatgtgcttacattgggcttgagcccaaagtcttttatctgccaaaaaaattaagaaactgaataagaagagacacaagggcaaagcaagactccccagtttagaacttggtttccaatagatctttctttttcagggcaatgggtggcaaaaccatgctgctcaaaatcacttgttttgaaacttaatggaatcaattacatatggagaaatttatatatgtaaaaatacagacatataactcagtggggaaaaaacagtcaaattggcatttgggtaacatatacaaagaatgtcatttaatgttatgaattgttagcattttaaaatagctactttgatattattttgattttgtatgaataaccattacactgggcacgtaggctgggcacagactaatagcaaagaataaaaatatgataaaagtgtgatccatcacaatttacagaaattaaagagattcattttactttggtttttccatatgtacagctgctgtattgaggtaatggtttcagataaaggtcagtttcccactttgccatttttactggggggagtatgaccggaggaggagagtggagcaagaagcaacattcataggatgctttctgtgtctccatacaatagtgtgtgccttgtgtggatatctcgttcaattccatccacacccctccaagggagaccctcatcatctcttgtagaccataaatttgaggtttagaaaggttaatttgcccaagagctcttagccagttagggccaggaataggattaagtcccagcctcatgacctatccacacctcacatgcttctttccaacaccaaatgtagtaaaaccagtacacagaaattcaagtcactttggatcagaaggtacaaaaactcttaccttgtttttgtcctttaggttttctaaacctttagtctatcctagtacataacatacagaacatatgttctatacatatcctaacatatgttctatacatatcctagtacatatagaacatatgttctatgtaaacagaaaggcaaatgcacatattagagaggaaacacgtgttcataaacacaggcttggttttcacatgatcacagccactcacagactctcaagcaccaatgcttgacaacgtgtgggaaaaccttgccttttaatttataaactttgactctgacaggtgacatattaatagtaactgtttataagaacagtgtgtatttctaagaatttattaactttattttttaaaattccttttagaatttatacatgcaaacattaagcataatagtgactatcagtctcaaaagtgtaatcgagtattttacctgataatatgcacctgtaatattaggtttgcaatgcaatatatgactatgtaacatgtgcctttctgctattaataagcattaagttctgccacagcagtgtggattaagccaagtgtagttagtggagtgaaacccacctaagaagatcaccatcagttccaccaaaaagcagtcaatttgataaaggatggtcaaaactgggaaatcttctagaaatggttcaatctatgtttatgtttttgaaaaacaattcattaaatttcctgagtgttctcattttttcgcatcacttacactttcagatagtgttcttgttttgaaacagtcaattccagaagaaagcactctgatcaacatggatcatagtgacaaggatctatgctaagctttgcctcttcctttgtcatccagatgctgcaaatgacttttgttgctgttcttgttctagatacttctggacacggtgtaaatacatctgatatgtatccaatgcccaataccttagaatatggaaacagaacttacaaaataattaatgcaaatatgacttggtatgcagcaataaaaacctgcctgatgcacaaagcacaactggtcagcatcacagaccagtatcaccagtccttcctcactgttgtcctcaaccggctaggatatgcccactggattggactgttcaccacagatgtaggtatcctaactcccttgagacatccttgaataattaagtttagcatctacctccttcatgatctggccactgaaattagcactgaaaaaaagatcccaaaaataataataaatataacacttaaataattggtttatgcaattacctgaccaaccttatgaacagcctatgactacaaaataagagtgcacacctctttagggtaaacatccacttgcctaatgtctggaaattaataccattcaaaggttctctgaaaatttccaagtaccccgatactgccttgcatgtgcactggaacacagctgaaactcaagcactgcatttgggaatttgcggcatttaatgaatccccaagaaaaaacgaatcatgcttcttgtctagaaatgtgattattaattagtttagtaccccttataattaagcacttgaggttttattttcctctagggatgtggtttagagaatacgttattttcatttttttaaataaaatattgtacactcaaagtagtgaaaagtaaactagtctatcctgacccctagttctactccctaatgttagtaattgtgaacactgtcttgtgtgccatctagaaattttccatgtatacacatacatattcatgtaatggaagaatatgtacattgtttttcaagcacaaatgagatcctattctacatgctgtctttaaacttgctttttaatttaatatatctttaacaacttcacatgtcagcacataaaaatctcatgaattctttagaacgcagcatgtaaggatataccacaacttattaaaccattctcctgtgaatagacatttgggttcttctcagtttttcacagttataaacaatgcacaacaaatatccttgtgccagtaggataattttttagaagtaaaattgctgcgtacacttaaaattttgacaagtactaccaaattgccctccaagagtttgcaccaatttacatgccaacaacagtatgtgataatgtctagttttttcacatccttgtcaacaccaggtattctcaaaattttaatccttgccagtgggagagataaatgaatgatatttcatgattatttattgcatcatgtagtacagaatgttttaacttcatgtagtcagttttgctttatagcctctggattttctatgacttggaaaggttttccccacaccaacagtataaaaaaatttaaccaggttttctttaacatgtttatgttttcaattttatgtttgaataattgatcaatctgaaatgtatttcactgtaaaagacaaggtactggtccaatttcacgccgattgctcactagaaaatcattgtggcagggagccaagaattcctaaaaatcaaaaaagatctcatttgtggcagatattcctgtttgtcaagctgtattcacagatgtcctagcccctctttaaaaaggtgtgcagaaatagcaatcgatgtgggaattgtagcatgctcagataacactgggtgatgctgccagccgtcgtggcaaggaaatgatggctcagttttcctccacagaatggtcttaattttgactggtctgatggcaccaaatcttctttcactttttggaaagatgaggagtcctccctccttggtgactgcgtttttgccgacagcaacggacgctggcatagcacagcctgcgagtcatttctgcaaggtgccatttgtcatgtgccacctggtaggttcaattctattcaactcaaaaatataccttatttaactactgtatgcaagacactgtgctaagcaaaggatatgaggatgagtatagtaagaagtctctcttcaagaagcctctggtctggttggtgatgtaaagaataacagaactacaaaatgatataagagaggtagcaaatgttatgggggttatcaagaaaaagaatgcattgtattcatttggagaaaggtagaaaggcttcttgaaggacatggcagtgcagatgggccttgataaataggtgggtgtagatgggtaataatgggacatggaaaggcattctgaggagaaaagctggatgaaaatggggaaggaagacaggacgaggcttacgtaagacaaagccgatgttgggatttgcctgaatgcaggttaggcgtaagggagaggtgggaaattagatgagaaacatgggcttcaagcatgtgtggaggactttgaggattcatgtttaaataaaagattgataggattccagagctacaataatgatgatggtgatattgtttggatatttactagatatctggctctgcactttacataatatctcatttacacttaaagttcacctggcctaacccctttattaaaaatgaaatgtaaactcagagcattaaatagtttcctaagtgtctcacagctgtccatcaccagtaccaagagtagaaatcaagtttcctgcatagaattcactaacacaagctggcctccttttaaatctctcatttagtaaaagtgcatgtatttacttacattctgggtactgtatcaaataacatacaaattatatatttttagatcaaaacaattcaggattaaatgtaaatgatagccacatatatcttggaaaagctaattctacttctaaaactccataaaagctgtccttcccttttctccttttttttttttttttttttgttagcacttgccttttcttggaatcttgtcctttcaataacaatgcatttattgaatgcttaagaagtgtcaggctctaactcattgaaacttctcaacttgtaaggaaggtggctgtgtggctcacaccagtaatcccagcactttgggaggcagaagcaggaggacctcttcaggccaggagtttgagaccagcttggttaacacagtgagactcgttaaaaaaaaaaaaaaattcaattatctgggcttggtggtacgtgcctatagtcctagctacttgggaggctgaggctggaggatcacttgagcccaggagtttgaggctgcagtgagctgtgattgtgccactgcacttcagcctaggtgacagagtgagactttgtcttttaaaaagttttttgtaattaaaaaaaatatttttaaaggttttgttgttagctctcttttatagataaagaaaccaagtgcaaggtaacatgcccatggtcacgcagctagtaagtggtggagccgggatctcagcatggatgtgtctaactctcatgcttgctctctgaaataaagtccctctggagttcccttatttattttatgttatgctatgttatgatactttattgaatgcattattttctttcacaggtttattagtgggtaaggacttttcaaatctgtgatacacagcactgcatgaaatgcatacatttggaaatctcttttaccagcatcagtcagctgccactctctctgggagtcatagcccctgcttgttccaacctttaggatgctaattgtaaacatgaaagagccaccctcacccaggcagcacccaaactaagcctacaaagctgtgccttaacatatcttgttatgtttaggtaaagattatttctgtcagaaatgctataaactggtcctagttttataatcatttacatgaaacccaatctttcagagtattaccatgaaaatcttgttacatatatttatcttgatcttttatagaatgtaatgtaatatttatctcaataaataaacccagtcaccaccctgaaatcataactggcttttcttcacagaaacaagacaatctgaacacccagagttgtgctcagaaacatctattccctggataaaatttaaaagtaattgctacagtttttctacagtcctagacagtatgagttttgaggctgctcatgaattttgcaaaaaggaaggtaattgtttttgtgatggtaaaaatgctttcatgtgctccttcttgccatttcagtaaacaatgtggatttctttattcatcccattatttagtgactttaggagcaacaaaaactaaactattgaaaaaataaatactattgaaattgcttgtttggaggacagctactatatgaaacaatgtccagtgtagaatttggaaacctaagatgatgtctcagcatactgcactttctgaagaaaacgttccttttgcatgcatttgcattatgaattttgaatgttccctaaaattaatattctatgccttaacttctgacgtgcaagcttgtatcttttaaaaaatgtggttttacttttttaatttaaagtctcttctttataatggaaattttcacttttcaaaacctgagctttacaattaatagtataggaaacattttttaaagtatatttatgtgtaaacacaaatattcctttgctacttgtctctcttataggttctaatcttttaacaatcaaggatgaggctgaaaatgcatttctcctagaagagctgtttgcttttggttcttctgtccagatggtttggttgaatgctcaatttgatggtaacagtaagtgatttgggtagaggagaggacataaataaatacatggttgttaaagctgatgataatggcatctgtgagccagaaaactctccttggatacgttttctgagaaaaaatagcatgaagcctaaagccatttcttccaaaaacaacattgcaacccttttctttacccttttgtcttttaaaataatcccagaacaccaaaaataaaaacaaacaataacatgtttatctttacccttagcaggaagatgcttggctggaactttgtgttcacagacttagtcattgcataccaaaaccatatttactggaaaatatcccaggtttctaaatgttataaaagcacaatagagttatggaaatgtttccatgatgaactgtgctgttaggattcttatttgctactcataaaaaccagagtttgtaataaaatggaagcatggtattcttttctttatgtaattgatggttattgaaaggtacttgtgaagaaaattattttaattggtatggagagcttgttacagtggtgtaccaaggttgggggtgagcctaccctttcgaggaggagtattttaatcaccaacattgtttagaatttcaagcagatggtgataataaaaagcagaccaacttttagttagctgtattgttagttttaaattattttcagacaatacactattgcccacacatgggatggactctcctaccgcccctacccccttggtacatggctggcttggtattaaagaaattcactgtaaaatctttttagaaagtgagccattttgtaatgatgaagatgttaggacttcaaaggatttttctttactcgattagttttgtttatcaaatgatttctttaaatcgattatatatatatatggaatatttcaaaattcaaactgtcacattaagaaacatgataacctaaatgacctaaataagaacactgtacctaaaataaagaggcaactttattaatgcctaccttttgatgttgagtacatcactgtatttactgagttgaatgtattagttcaagagtctcattaaattcaggggctgccatcccattactgggtatatacccaaaggactataaatcatgctgctataaagacacatacacacgtatgtttattgcggcactattcacaatagcaaagacttggaaccaacccaaatgtccaacaatgatagactggattaagaaaatgtggcacatatataccatggaatactatgcagccataaaaaaatgatgagttcatgtcctttgtagggacatggataaaattgcaaatcatcattctcagtaattatcgcaagaacaaaaaaccaaacactgcatattctcactcataggtgggaattgaacaatgagaacacatggacacaggaaggggaacatcacactctggggactgttgtggggtggggggaggagggagggatagcattgggagatatacctaatgctggatgacgagttagtgggtgcagcgcaccagcatgtcacatgtatacatatgtaactaacctgcacattgtgcacatgtaccctaaaacttaaagtataataataaaaaaataaaaataaaaataaaaaaataaaaaaattcaggggctgctttttatggttaattccagtcttagtatgtttgataaccatgcacataattcataatgagtcagcaattttctcacagatgaaaccataaagtggtttgatggaactcccacagaccagtcaaactggggcattcggaagccagacacagactacttcaagccccatcattgtgttgccttgaggatccctgaaggattatggcagctatccccgtgtcaagaaaaaaaaggctttatatgtaaaatggaggcaggtaggtaaagtcagagagtaattcttcattttgattctaccttaactaatgttgactgacttctttagcatttaaaggttttaaaatccaagttgagagagtattcagatagattctgacattattgttgtgttctgcaccaaacaagtcagagaatagttcagctccttctttctctgatatgagaaaaaaaatcattataagtcaactcaaagactatgatttttcttgtgtcacccaggttgatcacctaatgggcaaaaaatcattttccctcaagcaaatagaactaggaatgtaaaccagcaaccttcattctggtgactgctactcagaatttttaaggtttatgtttggcctcaggaaatataatctaggcttatgtatatttgctgtagacaagaagatgtgattccctgttgcaagcataatgtgtcataaaagtcacattttaacttaatcatcagtaacatacttagtgtttagtaattaaaaaaaacaataattttagaaatctaagctagaaaattctagtcactgatggtgggaaaatgtctataataattacagcaatttctagatgtcagtattataaaggagggattgctgtggcctgtactgctagagaaggcttcagacatgaggttttaggatcccaaaggatgaagagaattatagaagctggaacagaggaggaaaaggcccagcctgattaaaggcagcaactaagaatgtgtttcaattagagcaaagggctcacgtcagggggtgatgggaataaaattggatggtaatgtaggatcctttcacagagtgccaggctaaagagctgaactttgtggtggaagagacagaccccctatgtgctctgtagacacctgtgatgaagtagaactcatgaggatatgaagagaaacatttgtaatttgagtgattaaactaggaacgaaagaggaggggagaaataggaagagagaatcaccggccctgttgactgatttgagctgggaatgaagaagaaaacactgcaggtgtgggcaccaatgtttgaaacccccacagtgtgagtctcaactctgtgtgagagaaaaaaaaaaaaaaagaaaaacatggctaagcctgataaataatgtgcccaagttatcactagcttttaaatatcaagaacaaatcagaaacacctcatgtcttacaggactttaaagtttcctataatgcagatgacacctgtttcatccttcgcagcagctttccaaggtagtggagcaatttaaatatccccattttacagacgggaaaagtgcctgtgcaaactgaggctacatcaaggactacagagaaaactctaagttttctaagtgctctttccatgccgcccactgcttctatcctgagaacaaacactcttaacagtctttcttaaagatgtatctttatgtttaaagtgatggttatcccaagtacactatacaaattatatgactatattcaattatcacttgtgttctgaaaatttgtgcatctgatatgcatcaatttaaaagaagtgtcttcataaaaacacaataatacatattttcgacagtttaatgcaacgttaaatggcattgtttttatattaaaagaacaagtctgggccgggggtggtggctcacgcctgtaaatcccagcactttgggaggcagaggcagctggatcacttgaggtcaggagttcgagaccagcctggccaacatggcaaaactccatctctactaaaaatacaaaaattagccaggtgtgatggcacacacccgtaatcccagatactaaggaagctgaggcaagagaattgcttgaacccagggcagaggttgcagtgagccgagatcacgccattgtactctggcccgggcaacagagtgagacttcgcctcaaaaaaaaaaaaaaaaagaacaagtctggttttaaaagtatggttttgctattagtaacagtgttgtgatttttttcatgtctatcagagtgaatgagcatcagtaggacatcaaggcagttcttttgctcacaaatccatttcttcatcttcctctggttcattctctatacctttctctggatctttacctagatcaaaaatagaagagttcacattttgatataacatctacttaaaagatgtgtttttacagtagaaagttttaaaacagaaactctctaactttttggatggagaagctgttgctcattccccaagacccatgagatcacaaaggtgagaagatgctgatttaaaaatccttacaaagagtcaggcagattatcattgctggacaaactccatataagatcccaacaaaactgtgagttccttgtatgcagggtttatattttactctatatttattgcagcacagtgctgggactgaatagaaacttcttggcttaaaaaaaacaagcagggtgtatgtttgtgagcactaataacgatgattacaataaatcaaaggtcagcaaactttttctgtaaagggccagctagtaaacattttaggctttgggagccatatggtctctgttacatgccattgtagcaggaaagcagctgtaacaatacatcaatgaatgagtgtggctaagttccagtaaaacattttttataaaaatagggtcatgggccatagtttgctgatccctgagtaagtaatgacatatttttgctgaattaaaagaaaaacctcattttaatttttgtatttgattttagatattcacactgcagaggcgctgccagaaaaaggtacgtttgaaaccatacaaaacattttgatttttcttagaaataataagatagaaagcagctgtatgacagtatctatattacttcatcgccactgaagtttttctttttttaagaaaaatatcttctttcaggaccaagtcacagcatcattcctcttgcggttgtactgacactgatagtcattgtggccatttgcacactttccttctgcatatacaagcataacggtggcttcttcaggagacttgcagggtttcggaatccttactatcctgcaaccaactttagtacagtatatttagaagaaaatattctcatttctgatcttgagaagagtgaccaataataatgaggtcagagaatgccacagacaccagggtaagtaaagaagactaaacaggagtctcatctgtctttccctttacagcacagatgccattagaatgtgaattgggtcactattttaattattcttgaagtgattactggttttgaatcttaaccaaatcagatgggttttgatttattcatttccctaaactgtgatccattcttaaaaggggtaaattatgcattggttatttttcagaaagacaagaactattaaaagaaactccctattgaaaactctgaaatcaatgcgaataatagtttttgcattaatgtatctctactaaaatttgggggaattttaaaactaatctggtatctattcagacatttacctgcactcgtaccattaagaaagacagaaagaagcaaaaaaaaattaatcttgtatatgagaggaaaaggaaagggcttctgagaggattcttagttgtttcttttgaattcacttttaatagcaggatttggaaaatactaatttctgtgcttaagggtcacaggttctgggctctcaactgatatttaaggtgacattcatttttattaggtctaacatctcaagctaaaggagaaagaaaaataccttcttttaaatggcaaagaccttcattagcagcacacttttataaacaaccatatagttaaaatgtggccttaaactttcaattactaaatgatgattaagttggatattttaaaatgtcttatacataagcttaaagtaatatattgaaactttaacagttgtactgttaaaactcatggactttctgaaaaactaaatatataaaataatatgtaacactcttaataactggaagatataaaatgtaacttggatttaaaggagaagagctaaagatctgaattatagtctcattagaaccagacagatgttgttgagaagtactaaataaattagtaatctagatatctttattatgtaaatgagtttaggtgttctatttaataaactattttctgggaacgatctccttttatattagtctagttagtgtagatggtaaataatgattatgatactgtctgtaaataaaaaattacagattttattttcctttattagttccttataaagaaaacagcttcataatcaatatctaaaaatttactcattacataactgtttattgaattttatcaagaaaaaagtgtactgagcatggtggcacgcacctgtagtcccagctacttaggaggctgagggaagaggatcaactgagcccagaagttgaaggctgcagtgagctatggttgcaccactgcactcctgcctgggcaactgaatgagaccccacctcaaaaaagtgctgttctagaaacagaggtactaaggtgagcaacttggggtaagggctatcttttcatgccacttattttctaatgagggaaaattgacagtaactcagtaaagaaatgcatatgcataaaatagcaagtggttatgaaaatgaagtaaggttccatgatagagagaaactgggggactctcagggcctccctgagagtgtgcattttaattattacaaccaactgcctcaaaaccagtggccactaatcacaagggggagctctgagagaaagtatgaatgaatttctaagaggcaaaccatcatcattagaaatacaatttgaagagcataccactaagaatggaatccttgtggcctgcaacagttaatccagcttccaaaagcagctctttgctactgttataataatttacacactgggacagtctacctccataatttttttaagtattgggacttcattttttaaaagatattatattatgtggcagttgcatatttatgactcaaaaaataattggcttgaactcaccagatggtataaaagcccaatttaaccatcttttgagtggaattaaagttctgttcttttcaatggacttggtaaaaactgctaatcaaccagccttccagtcaaggtatatagtcacacataataatttgacaaaatacaccattaggaaagtgattttgcagaaagaagctgtattgcttctcagtgctccatactttgatgtttagtattgaacaacatctccagataatctggacccatggacagatcacacacttcttgccattactgaatttgcagaaatagtactgaagtattctgctacatttttatatttgcattttttttgaaactttttttcatttttttttttttttttttggagatggagtcttgctctgttgccaggcaggagtacagtggcatgatctcagctcactgcaaccttcaactgcctggttcgagcaagtttcctgcctcagcctcccgagtagctgtgattacaggcacatgccaccatgcccagctaatttttgtatttttagtagagacagggtttcaccatgttgtccaggatggtctcgatctcctgatctcgtgatccacccgccccagcctcccaaagtgctaagattacaggcatgagccaccgcacctggcctcatctgtatttttaatgtgaactagattttatagctataattcgaaaagaaaaaaaagtagcaggtaatgggtatattatacactatttgcgtgatggttacaccagactttaccactacatactgtatttatgtaacaaaattacacttgtactccttacatttatgccaaaaaagcggcaggatcacaaattcacacatagttaatgtgcccctccaacagtcaattatgttctatgactaacctgaggatctttatagaatctgagtaatggaaatgcctgggtttttccatttaacaatatattgggctcttacagttacaacagtcttctttcgggttaaatatttcttctcttgaagggtccactccttattaaagataagattgaactgaatgtttacttaaacgttcagtcttttggagtttctttactcttctcaaaatggtggttggatttataagaacttgctgtgtcttggtagtgttgaggggagaaggtgacaacttactgtggatgtatgttagctggtgtccactgagaatagctgtctggcctcactcctgggaattctgctggcatctgctgtgaagtctgcagttgctttaatctgtagtctgttctctttgatttggcctcattctggctgtccctggtgctgtcttatctcttgagaactggctgtgtctcctgttgaattccctatccgaacactgcagttcttggctacaaggcagtcacttcacccctgcagtggtgagatcccattagctaccattagctactcttttcgtccagaaaggcgaaatgccatagcaaacaatcccacagtcttggtggattaacacagcaaaggtttatttctcacccacacctgcatgggctggcaagaggactttgctctgttcagtcattcatgggtccatgcttctcctatatagccagccctctgtctcctaaggcctggagtcctccatgggcctccaatctgtggctgacagaggatgttgacttgagacccatctttgattcattatggagcttccacaggctgttgaaatcctctaagtcaaaagtcctcaaactggggacacatgcctaaggaatacaggagcatgggtatttaagaaacttaatttccagaatcttcatgtatattttttcttaaaactgatttacctgagagcacccctggttcttctttcccacctctctttacacaaatgcctttctctacctttaaaaagaaaaagaaaaagaaatggctttcatttcagatcttactatgggaaaatcctccatggctccaaagaaaaatattcgaagtattgatgtcagtgaagcttcttttaataaagaaattgtaaactcattctgtagatcctcacgtctttctctgtgttaggacatttttctgttaaagttgaagcgatgacttagaaatgagttattttgccccatgttcatattctgaattaatatgtattatacagtggaacagctggagtgctactttcatttgaaaatttatctcatccactgcctgactattgtcagagaacaagctgtagaaaaagtctggtgaaagcaaagtgaagcatgtgttgccaagaacctaacatcttatgttatccagaagaaagtcccaaggcttgatttatcttagatttctatgtgagttgtgaggatgagtattaacaagcttatttgaactgaaaaatgaattcagaccttttctgaagttttttttatttggctcattggtttgacaacaaggattgactttacccattaagttttatgatgaacattttgtattaattgaatgaactaaatctgctgctcttgtgttctgattaaagcttgtaataggataaaggcattttaatagaaaaatagtattgaccgaactataatgaagtgatattttacttttcccagccttcatttgtatatcaggtaaagcaagatgcctgtaagtgaaagagtaacaggcataatgaacagttatttgaagagtcttagtaaagccttttaattttacttgtaggaaattgacatgaatcattctaatgactgggtaacaaatcactttgcaagtagggtgtttccacttctatgctttaaaaaaaactgaaggagaacataatcaagcagttggttgatatagaaaataatttttaatgtagaatcactgattttttggcacctatgagaaaggaattcaagtaatagagggatattgttataacaaacctccttttattcccatctacttatttatatgaacaaagtttctatgttaagataagttagagtgtgctgtggaaacaaaccctgtaatactagtggttaaaaacaaaactcagaagttaatttattgatcatgcgaagcctgctatggtcaggacacttgcctccaagcagtaactcacagatccaggctgtgtcctacctccagaacatggggcttccagtgctgctatggcactagagaactgttaagttcccaggtttaggaagaaacacgtggcacttccactcgcgtgtcattggctggaactagtcacatgacctaacctaactgaaaggaaatccaggaagtcttctgctttgtgtgctcaggaaagagaggataagggactacagacagcaccagcaattgctaccagagtttctcaacatgtatagctacaaaaaaagaagagagagaacagaattgatgctgaaccttgatttatactagcagtttttaatactaattaatttttatctatgatatatccatttcattaacagatccatttgctatcattttagtttgacatatactatcttaatctttgtaacatatttattttgttctgatcaattgtatactaacaataattgaaatgacaactcaatatagaagaaaatgtgtaatacttagagcctatgttcacagggacttcttaaaaaataattttaggctgggcgcggtggctcacgcctgtaatcccagcaactttgggaggccgaggcgggtggatcacgaggtgaggagatcgagaccatcctggctaacaaggtgaaaccccgtctctactaaaaatacaaaaaaattagctgtgtgttgtggcgggtgcctgtattcccagctactcgggaggctgaggcaggagaatggcatgaacctggaagtcggagcttacagtgagccgagatggcgccactgcactccagcctgggcgacagagcgagactctctctcaaaaaaaaaaaaaaaaattaatttatatacatatttttactgcaggaaaatatgacaaggtaatgaataaaatatttcacaaattaaagtatatctcattaggataaaattctgtgggggagttggaatggaaatacaagattgaaagaaagtaatatctctgactgctgaagaggttatttctatttttaaatagattatgatagaattcaaattgttgtagtatctccagtcaaaggaacttaggcttcttgagaaagtggttgattgcaggtctaaggcaggaaaatacaagatgaaactggaatatcttgtgatggcagaaaataaggaggtgctcacaaaaagatggcacatgtccgaaggctacaggaaccaacctgaaggagctctccagtggaaatgctggaacaatttgagcaaacaataaaaaattataatattggattataacccacacaataaatatctgtgtgtccatactgatgtaaacaattgaatgagtgaatgaatgaatgaaaagaagaaacagttcttctccccagtaaattccaattgataaatttagaagaaatgggagaaacaaaaatcactatcaggaaaacacaacagtaataattgttggcaagacctaccagttggtgcaaaagttagtgggtgaatgtttgaggaaaaacagaatatttgcataaccttagagtattttccccaaaataatcactaattacaaagagaaagtaataactttacagtagagaaacttctttaatcaagggatcaaggttaacagaagcagtaataagccacatcagcatcatgtaccccctggtatggcattgagaagggcacatgacttctttggtatcctccccaaaatgcataatctcaatcatgaaaaaacattagacaaatccaagttgagggacattccacaagataaatgatcacttcaaaagtgtcctggtcatgaaagataaggaaagattgaggaaatgtcaaggattggaggacactaaagagacatgacaactacgtgcaagttgaaatcctcaaatggatcatggaacagaaaatggtcattatgggaaaatgggaaagtaaaataaagtctatggtttaattaatagtattgtaccagtattagtttctttgttttgatgattataccatggttttatgagatgtaccattagaagaagctgaaggaggctgtacaggaactctctggactaagttggcaatttttctgtaaacctaaaatcatttcaatataaaaagttaacattttgctatgatattagacaccactggatatattaaaagggtgataaggcacttttatttttacatgttgttatttataatattctgaaaattgcatcctaattataaaaaattttggctgtcaacttagaaattcgtgaagcaatatgccttctttcatgattcttttaacaattttgtatgctagccaaaaagtttgaggaccactgctatatgacattttttctctcatgtctcagatgagaagcagggcaaaaccctgtgtgtctccaacttacctaacacaccatccgctgtaggattaggagccagacacgtcttgctgcaggccatgctcacttccatctgctctcttttccctgcattcttcttttgtgtcacttccctgtcttgtcagtacttctaattctcatagccctgctatcccctacaacctcgtgccttagtattaatagggtacagcagggaaaaactcacttagtttccattttgttcttggagaagaaaaatttggagacatttccaaaatggcatgtacatcataattcttattgccaacatttataagaaactttgactgtagtgattatcaagatacatgcttggaatatttattccctctttccccacctttcaaaataaggatttagagcaggagttggcagggccaaatccagcctgcagcctattttggaaataaagttattgggatgctgccatccccattcactcacatactgtgcatgactgctttcatgcttccatgacagagctgagtggttgcaacagagaccgaatggcctgcaaagcctaaaatatttactttctggacccttacaggaagtttgccaacccctgatttagaaagtgaaaacctaaatggggaagtcttacatactttaacgtatcttagcaagcactgttatgttaatgtatatggacagcacttaaaatatatcaataaacaattatgatcagtaaacatttatttagagcctattgtggcccagagagtgtcctgtgctcagaggctataaataccaataacaccccatctctcccctcatggaactcagtctcaggggagaggaatatgtaaatgataagtgcaatgcaatgtgacataaataatatcaagaagaagagaatcagaaaaaaaaggagaggggactgattaattctgtcagaagtagagaaaggcttaacaagataagtgatatgtattaaattgtaggaaatgttagataaacagctttctttagtattttttgagttagaaagcaagtttttagcttggggtcagaatatttttagagaaaaagtttaaaatgtgcctaaatctgaaattctggatttaaaaaagtgaaaatctgcatgttcctctaatacctaatgacgaattctaattgcagaaggatgccaataactaaaaccacaaaatgaaccctatgtataccggtgaccttctttactcagaattaattaacacaagcacttgtttcttgcagagcactttgctgtaatttagaacaaattaagggaaaaaatcattcaagtgctgttttcttcacaccatgaagtaagcatgatggaccaaagttaactaatttaaaatattatcatccatttcttgtaattatgaatagcaataccatcttttttcttcaaaaaaaaaaagacatcatgatctatgctattttcaacttgtttcctgtgcttctattaatggaaattgatttttcaagattaatgtaaaatgtgtttctgtttctcccattaagtctcttatttatattagatccaatgtatatgttcctggatatttttcaaataaatatatttttaatataatacagcaaattgtaaattgttaaaggaccatttataatgttttctccttgccctccctagcactgaaactgtggttttattattgtcttcacactgttgtttgtgaattaacttgagctccttgagttcctacttctaagagattatttaaactttactttttaccttcttagtatacagagcttggtaggagctggaaacccgactcacagatttaggaaacagtgggttcttgtccctgtggacatcagaacttgggggacggagagatagagaaccagaaggcagaacaaggaaaaactcaaagaaaggaatggggaggaatggaaacgtaacaggacatgttgcctcagtgagtcaccaagggctttggagttcttagcccaaaatgtggttctgtggaggctgaggacaaacttcaggacagagcatgccttaatcgatgtgctaagccactggctcgggcagtccttaagcaagggctcctctgatcagacaaggaattgtttccttcccttttactccagatgacacctaaaggtgcaaaagaaaaccatctctgcacactaccaaacagacagtgcgtgaacgaagcagaccctcctgaccacagccaaggactggagagcttggtgaaactggtgctcaaggtagaaattccctgcgattgctactgcaacttatactaaacgtcccaagtgaagtgaagggagaaaaaagagatattaagcaagaaggcccacttgtttatgcattgctttagaagataatctgtaattgcatattaataagtaaagttaacgttacacttaaataataacctatatttgttactgcatttgaatcactcttatctgacttagttggtcaggaaatcaaaaaagtcagttaaaggaaggaatcataagaattgttttaacattagtttaaacattttattttctattagaacacataaacgtacatttatccactaa

SEQ ID NO: 35 - DNA, 5080 bp, Homo Sapiens
cccgagtgtcggttcactgtggagacagcggtggcggagtgggtctccagggctctgggctggcaaggcccccggaggggtggggcgcggaggaggctacggatccgcttccgcgcggcggggccgggtgcttgggacgcggctctgggctcccgggataaggggctcccgggacaaggggctcccggagagcccagtggttagcgatgctgctgtcgccgtcgctgctgctgctgctgctgctgggggcgccgcggggctgcgccgagggtgtggcggcggcgcttacccccgagcggctcctggagtggcaggataaaggaatatttgttatccaaagtgagagtctcaagaaatgcattcaagcaggtaaatcggttctgaccctggagaactgcaagcaagcaaacaagcacatgctgtggaaatgggtttcaaaccatggcctctttaacataggaggcagtggttgcctgggcctgaatttctccgccccagagcagccattaagcttatatgaatgtgactccaccctcgtttccttacggtggcgctgtaacaggaagatgatcacaggcccgctgcagtactctgtccaggtggcgcatgacaacacagtggtggcctcacggaagtatattcataagtggatttcttatgggtcaggtggtggagacatttgtgaatatctacacaaagatttgcatacaatcaaagggaacacccacgggatgccgtgtatgtttcccttccagtataaccatcagtggcatcatgaatgtacccgtgaaggtcgggaagatgacttactgtggtgtgccacgacaagccgttatgaaagagatgaaaagtggggattttgccctgatcccacctctgcagaagtaggttgtgatactatttgggagaaggacctcaattcacacatttgctaccagttcaacctgctttcatctctctcttggagtgaggcacattcttcatgccagatgcaaggaggtacgctgttaagtattacagatgaaactgaagaaaatttcataagggagcacatgagcagtaaaacagtggaggtgtggatgggcctcaatcagctggatgaacacgctggctggcagtggtctgatggaacgccgctcaactatctgaattggagcccagaggtaaattttgagccatttgttgaagatcactgtggaacatttagttcatttatgccaagtgcctggaggagtcgggattgtgagtccaccttgccatatatatgtaaaaaatatctaaaccacattgatcatgaaatagttgaaaaagatgcgtggaaatattatgctacccactgtgagcctggctggaatccctacaatcgtaattgctacaaacttcagaaagaagaaaagacctggcatgaggctctgcgttcttgtcaggctgataacagtgcattaatagacataacctcattagcagaggtggagtttcttgtaaccctccttggagatgaaaatgcatcagaaacatggattggtttgagcagcaataaaattccagtttcctttgaatggtctaatgactcttcagtcatctttactaattggcacacacttgagccccacatttttccaaatagaagccagctgtgtgtctcagcagagcagtctgagggacactggaaagtcaaaaattgtgaagaaagacttttttacatttgtaaaaaagcaggccatgtcctctctgatgctgaatcaggatgtcaagagggatgggagagacatggtggattctgttacaaaattgacacagtccttcgaagctttgaccaagcttccagcggttattactgtcctcctgcacttgtaaccattacaaacaggtttgaacaggcttttattaccagtttgatcagtagtgtggtaaaaatgaaggacagttatttttggatagctcttcaggaccaaaatgatacgggagaatacacttggaagccagtagggcagaaacccgagccggtgcagtacacacactggaacacacaccagccgcgctacagtggtggctgtgttgccatgcgaggaaggcatccacttggtcgctgggaagtgaagcactgtcggcactttaaggcaatgtccttgtgcaagcagccagttgaaaatcaggaaaaagcagagtatgaagagagatggccctttcacccctgctatttggactgggagtcagagcctggtctggccagttgcttcaaggtatttcatagtgaaaaagttctgatgaaaagaacatggagagaagctgaagcattttgcgaagaatttggagctcatcttgcaagctttgcccatattgaggaagagaattttgtgaatgagctcttacattcaaaatttaattggacagaagaaaggcagttctggattggatttaataaaagaaacccactgaatgccggctcatgggagtggtctgatagaactcctgttgtctcttcgtttttagacaacacttattttggagaagatgcaagaaactgtgctgtttataaggcaaacaaaacattgctgcccttacactgtggttccaaacgtgaatggatatgcaaaatcccaagagatgtgaaacccaagattccgttctggtaccagtacgatgtaccctggctcttttatcaggatgcagaatacctttttcatacctttgcctcagaatggttgaactttgagtttgtctgtagctggctgcacagtgatcttctcacaattcattctgcacatgagcaagaattcatccacagcaaaataaaagcgctatcaaagtatggtgcaagttggtggattggacttcaagaagaaagagccaatgatgaatttcgctggagagatggaacaccagtgatataccagaactgggacacaggaagagaaagaactgtgaataatcagagccagagatgtggctttatttcttctataacaggactctggggtagtgaagagtgttcagtttctatgcctagtatctgtaagcgaaaaaaggtttggctcatagagaaaaagaaagatacaccaaaacaacatggaacgtgtcccaaaggatggctatattttaactataagtgccttctgctgaatatccccaaagacccaagcagttggaagaactggacgcatgctcaacatttctgtgctgaagaaggggggaccctggtcgccattgaaagtgaggtggagcaagctttcattactatgaatctttttggccagaccaccagtgtgtggataggtttacaaaatgatgattatgaaacatggctaaatggaaagcctgtggtatattctaactggtctccatttgatataataaatattccaagtcacaataccactgaagttcagaaacacattcctctctgtgccttactctcaagtaatcctaattttcatttcactggaaaatggtattttgaagactgtggaaaggaaggctatgggtttgtttgtgaaaaaatgcaagatacttctggacacggtgtaaatacatctgatatgtatccaatgcccaataccttagaatatggaaacagaacttacaaaataattaatgcaaatatgacttggtatgcagcaataaaaacctgcctgatgcacaaagcacaactggtcagcatcacagaccagtatcaccagtccttcctcactgttgtcctcaaccggctaggatatgcccactggattggactgttcaccacagataatggtcttaattttgactggtctgatggcaccaaatcttctttcactttttggaaagatgaggagtcctccctccttggtgactgcgtttttgccgacagcaacggacgctggcatagcacagcctgcgagtcatttctgcaaggtgccatttgtcatgtgccacctgaaacaagacaatctgaacacccagagttgtgctcagaaacatctattccctggataaaatttaaaagtaattgctacagtttttctacagtcctagacagtatgagttttgaggctgctcatgaattttgcaaaaaggaaggttctaatcttttaacaatcaaggatgaggctgaaaatgcatttctcctagaagagctgtttgcttttggttcttctgtccagatggtttggttgaatgctcaatttgatggtaacaatgaaaccataaagtggtttgatggaactcccacagaccagtcaaactggggcattcggaagccagacacagactacttcaagccccatcattgtgttgccttgaggatccctgaaggattatggcagctatccccgtgtcaagaaaaaaaaggctttatatgtaaaatggaggcagatattcacactgcagaggcgctgccagaaaaaggaccaagtcacagcatcattcctcttgcggttgtactgacactgatagtcattgtggccatttgcacactttccttctgcatatacaagcataacggtggcttcttcaggagacttgcagggtttcggaatccttactatcctgcaaccaactttagtacagtatatttagaagaaaatattctcatttctgatcttgagaagagtgaccaataataatgaggtcagagaatgccacagacaccaggatgacacctaaaggtgcaaaagaaaaccatctctgcacactaccaaacagacagtgcgtgaacgaagcagaccctcctgaccacagccaaggactggagagcttggtgaaactggtgctcaaggtagaaattccctgcgattgctactgcaacttatactaaacgtcccaagtgaagtgaagggagaaaaaagagatattaagcaagaaggcccacttgtttatgcattgctttagaagataatctgtaattgcatattaataagtaaagttaacgttacacttaaataataacctatatttgttactgcatttgaatcactcttatctgacttagttggtcaggaaatcaaaaaagtcagttaaaggaaggaatcataagaattgttttaacattagtttaaacattttattttctattagaacacataaacgtacatttatccactaa

SEQ ID NO: 36 - protein, 1463 aa, Homo Sapiens
MLLSPSLLLLLLLGAPRGCAEGVAAALTPERLLEWQDKGIFVIQSESLKKCIQAGKSVLTLENCKQANKHMLWKWVSNHGLFNIGGSGCLGLNFSAPEQPLSLYECDSTLVSLRWRCNRKMITGPLQYSVQVAHDNTVVASRKYIHKWISYGSGGGDICEYLHKDLHTIKGNTHGMPCMFPFQYNHQWHHECTREGREDDLLWCATTSRYERDEKWGFCPDPTSAEVGCDTIWEKDLNSHICYQFNLLSSLSWSEAHSSCQMQGGTLLSITDETEENFIREHMSSKTVEVWMGLNQLDEHAGWQWSDGTPLNYLNWSPEVNFEPFVEDHCGTFSSFMPSAWRSRDCESTLPYICKKYLNHIDHEIVEKDAWKYYATHCEPGWNPYNRNCYKLQKEEKTWHEALRSCQADNSALIDITSLAEVEFLVTLLGDENASETWIGLSSNKIPVSFEWSNDSSVIFTNWHTLEPHIFPNRSQLCVSAEQSEGHWKVKNCEERLFYICKKAGHVLSDAESGCQEGWERHGGFCYKIDTVLRSFDQASSGYYCPPALVTITNRFEQAFITSLISSVVKMKDSYFWIALQDQNDTGEYTWKPVGQKPEPVQYTHWNTHQPRYSGGCVAMRGRHPLGRWEVKHCRHFKAMSLCKQPVENQEKAEYEERWPFHPCYLDWESEPGLASCFKVFHSEKVLMKRTWREAEAFCEEFGAHLASFAHIEEENFVNELLHSKFNWTEERQFWIGFNKRNPLNAGSWEWSDRTPVVSSFLDNTYFGEDARNCAVYKANKTLLPLHCGSKREWICKIPRDVKPKIPFWYQYDVPWLFYQDAEYLFHTFASEWLNFEFVCSWLHSDLLTIHSAHEQEFIHSKIKALSKYGASWWIGLQEERANDEFRWRDGTPVIYQNWDTGRERTVNNQSQRCGFISSITGLWGSEECSVSMPSICKRKKVWLIEKKKDTPKQHGTCPKGWLYFNYKCLLLNIPKDPSSWKNWTHAQHFCAEEGGTLVAIESEVEQAFITMNLFGQTTSVWIGLQNDDYETWLNGKPVVYSNWSPFDIINIPSHNTTEVQKHIPLCALLSSNPNFHFTGKWYFEDCGKEGYGFVCEKMQDTSGHGVNTSDMYPMPNTLEYGNRTYKIINANMTWYAAIKTCLMHKAQLVSITDQYHQSFLTVVLNRLGYAHWIGLFTTDNGLNFDWSDGTKSSFTFWKDEESSLLGDCVFADSNGRWHSTACESFLQGAICHVPPETRQSEHPELCSETSIPWIKFKSNCYSFSTVLDSMSFEAAHEFCKKEGSNLLTIKDEAENAFLLEELFAFGSSVQMVWLNAQFDGNNETIKWFDGTPTDQSNWGIRKPDTDYFKPHHCVALRIPEGLWQLSPCQEKKGFICKMEADIHTAEALPEKGPSHSIIPLAVVLTLIVIVAICTLSFCIYKHNGGFFRRLAGFRNPYYPATNFSTVYLEENILISDLEKSDQ

SEQ ID NO: 37 - DNA, 5627 bp, Homo Sapiens
cccgagtgtcggttcactgtggagacagcggtggcggagtgggtctccagggctctgggctggcaaggcccccggaggggtggggcgcggaggaggctacggatccgcttccgcgcggcggggccgggtgcttgggacgcggctctgggctcccgggataaggggctcccgggacaaggggctcccggagagcccagtggttagcgatgctgctgtcgccgtcgctgctgctgctgctgctgctgggggcgccgcggggctgcgccgagggtgtggcggcggcgcttacccccgagcggctcctggagtggcaggataaaggaatatttgttatccaaagtgagagtctcaagaaatgcattcaagcaggtaaatcggttctgaccctggagaactgcaagcaagcaaacaagcacatgctgtggaaatgggtttcaaaccatggcctctttaacataggaggcagtggttgcctgggcctgaatttctccgccccagagcagccattaagcttatatgaatgtgactccaccctcgtttccttacggtggcgctgtaacaggaagatgatcacaggcccgctgcagtactctgtccaggtggcgcatgacaacacagtggtggcctcacggaagtatattcataagtggatttcttatgggtcaggtggtggagacatttgtgaatatctacacaaagatttgcatacaatcaaagggaacacccacgggatgccgtgtatgtttcccttccagtataaccatcagtggcatcatgaatgtacccgtgaaggtcgggaagatgacttactgtggtgtgccacgacaagccgttatgaaagagatgaaaagtggggattttgccctgatcccacctctgcagaagtaggttgtgatactatttgggagaaggacctcaattcacacatttgctaccagttcaacctgctttcatctctctcttggagtgaggcacattcttcatgccagatgcaaggaggtacgctgttaagtattacagatgaaactgaagaaaatttcataagggagcacatgagcagtaaaacagtggaggtgtggatgggcctcaatcagctggatgaacacgctggctggcagtggtctgatggaacgccgctcaactatctgaattggagcccagaggtaaattttgagccatttgttgaagatcactgtggaacatttagttcatttatgccaagtgcctggaggagtcgggattgtgagtccaccttgccatatatatgtaaaaaatatctaaaccacattgatcatgaaatagttgaaaaagatgcgtggaaatattatgctacccactgtgagcctggctggaatccctacaatcgtaattgctacaaacttcagaaagaagaaaagacctggcatgaggctctgcgttcttgtcaggctgataacagtgcattaatagacataacctcattagcagaggtggagtttcttgtaaccctccttggagatgaaaatgcatcagaaacatggattggtttgagcagcaataaaattccagtttcctttgaatggtctaatgactcttcagtcatctttactaattggcacacacttgagccccacatttttccaaatagaagccagctgtgtgtctcagcagagcagtctgagggacactggaaagtcaaaaattgtgaagaaagacttttttacatttgtaaaaaagcaggccatgtcctctctgatgctgaatcaggatgtcaagagggatgggagagacatggtggattctgttacaaaattgacacagtccttcgaagctttgaccaagcttccagcggttattactgtcctcctgcacttgtaaccattacaaacaggtttgaacaggcttttattaccagtttgatcagtagtgtggtaaaaatgaaggacagttatttttggatagctcttcaggaccaaaatgatacgggagaatacacttggaagccagtagggcagaaacccgagccggtgcagtacacacactggaacacacaccagccgcgctacagtggtggctgtgttgccatgcgaggaaggcatccacttggtcgctgggaagtgaagcactgtcggcactttaaggcaatgtccttgtgcaagcagccagttgaaaatcaggaaaaagcagagtatgaagagagatggccctttcacccctgctatttggactgggagtcagagcctggtctggccagttgcttcaaggtatttcatagtgaaaaagttctgatgaaaagaacatggagagaagctgaagcattttgcgaagaatttggagctcatcttgcaagctttgcccatattgaggaagagaattttgtgaatgagctcttacattcaaaatttaattggacagaagaaaggcagttctggattggatttaataaaagaaacccactgaatgccggctcatgggagtggtctgatagaactcctgttgtctcttcgtttttagacaacacttattttggagaagatgcaagaaactgtgctgtttataaggcaaacaaaacattgctgcccttacactgtggttccaaacgtgaatggatatgcaaaatcccaagagatgtgaaacccaagattccgttctggtaccagtacgatgtaccctggctcttttatcaggatgcagaatacctttttcatacctttgcctcagaatggttgaactttgagtttgtctgtagctggctgcacagtgatcttctcacaattcattctgcacatgagcaagaattcatccacagcaaaataaaagcgctatcaaagtatggtgcaagttggtggattggacttcaagaagaaagagccaatgatgaatttcgctggagagatggaacaccagtgatataccagaactgggacacaggaagagaaagaactgtgaataatcagagccagagatgtggctttatttcttctataacaggactctggggtagtgaagagtgttcagtttctatgcctagtatctgtaagcgaaaaaaggtttggctcatagagaaaaagaaagatacaccaaaacaacatggaacgtgtcccaaaggatggctatattttaactataagtgccttctgctgaatatccccaaagacccaagcagttggaagaactggacgcatgctcaacatttctgtgctgaagaaggggggaccctggtcgccattgaaagtgaggtggagcaagctttcattactatgaatctttttggccagaccaccagtgtgtggataggtttacaaaatgatgattatgaaacatggctaaatggaaagcctgtggtatattctaactggtctccatttgatataataaatattccaagtcacaataccactgaagttcagaaacacattcctctctgtgccttactctcaagtaatcctaattttcatttcactggaaaatggtattttgaagactgtggaaaggaaggctatgggtttgtttgtgaaaaaatgcaagatacttctggacacggtgtaaatacatctgatatgtatccaatgcccaataccttagaatatggaaacagaacttacaaaataattaatgcaaatatgacttggtatgcagcaataaaaacctgcctgatgcacaaagcacaactggtcagcatcacagaccagtatcaccagtccttcctcactgttgtcctcaaccggctaggatatgcccactggattggactgttcaccacagataatggtcttaattttgactggtctgatggcaccaaatcttctttcactttttggaaagatgaggagtcctccctccttggtgactgcgtttttgccgacagcaacggacgctggcatagcacagcctgcgagtcatttctgcaaggtgccatttgtcatgtgccacctgaaacaagacaatctgaacacccagagttgtgctcagaaacatctattccctggataaaatttaaaagtaattgctacagtttttctacagtcctagacagtatgagttttgaggctgctcatgaattttgcaaaaaggaaggttctaatcttttaacaatcaaggatgaggctgaaaatgcatttctcctagaagagctgtttgcttttggttcttctgtccagatggtttggttgaatgctcaatttgatggtaacaatgaaaccataaagtggtttgatggaactcccacagaccagtcaaactggggcattcggaagccagacacagactacttcaagccccatcattgtgttgccttgaggatccctgaaggattatggcagctatccccgtgtcaagaaaaaaaaggctttatatgtaaaatggaggcagatattcacactgcagaggcgctgccagaaaaaggaccaagtcacagcatcattcctcttgcggttgtactgacactgatagtcattgtggccatttgcacactttccttctgcatatacaagcataacggtggcttcttcaggagacttgcagggtttcggaatccttactatcctgcaaccaactttagtacagtatatttagaagaaaatattctcatttctgatcttgagaagagtgaccaataataatgaggtcagagaatgccacagacaccagggtaagtaaagaagactaaacaggagtctcatctgtctttccctttacagcacagatgccattagaatgtgaattgggtcactattttaattattcttgaagtgattactggttttgaatcttaaccaaatcagatgggttttgatttattcatttccctaaactgtgatccattcttaaaaggggtaaattatgcattggttatttttcagaaagacaagaactattaaaagaaactccctattgaaaactctgaaatcaatgcgaataatagtttttgcattaatgtatctctactaaaatttgggggaattttaaaactaatctggtatctattcagacatttacctgcactcgtaccattaagaaagacagaaagaagcaaaaaaaaattaatcttgtatatgagaggaaaaggaaagggcttctgagaggattcttagttgtttcttttgaattcacttttaatagcaggatttggaaaatactaatttctgtgcttaagggtcacaggttctgggctctcaactgatatttaaggtgacattcatttttattaggtctaacatctcaagctaaaggagaaagaaaaataccttcttttaaatggcaaagaccttcattagcagcacacttttataaacaaccatatagttaaaatgtggccttaaactttcaattactaaatgatgattaagttggatattttaaaatgtcttatacataagcttaaagtaatatattgaaactttaacagttgtactgttaaaactcatggactttctgaaaaactaaatatataaaataatatgtaacactcttaataactggaagatataaaatgtaacttggatttaaaggagaagagctaaagatctgaattatagtctcattagaaccagacagatgttgttgagaagtactaaataaattagtaatctagatatctttattatgtaaatgagtttaggtgttctatttaataaactattttctgg

SEQ ID NO: 38 - protein, 1463 aa, Homo Sapiens; identical to SEQ ID NO: 36

SEQ ID NO: 39 - DNA, 4868 bp, Homo Sapiens
cccgagtgtcggttcactgtggagacagcggtggcggagtgggtctccagggctctgggctggcaaggcccccggaggggtggggcgcggaggaggctacggatccgcttccgcgcggcggggccgggtgcttgggacgcggctctgggctcccgggataaggggctcccgggacaaggggctcccggagagcccagtggttagcgatgctgctgtcgccgtcgctgctgctgctgctgctgctgggggcgccgcggggctgcgccgagggtgtggcggcggcgcttacccccgagcggctcctggagtggcaggataaaggaatatttgttatccaaagtgagagtctcaagaaatgcattcaagcaggtaaatcggttctgaccctggagaactgcaagcaagcaaacaagcacatgctgtggaaatgggtttcaaaccatggcctctttaacataggaggcagtggttgcctgggcctgaatttctccgccccagagcagccattaagcttatatgaatgtgactccaccctcgtttccttacggtggcgctgtaacaggaagatgatcacaggcccgctgcagtactctgtccaggtggcgcatgacaacacagtggtggcctcacggaagtatattcataagtggatttcttatgggtcaggtggtggagacatttgtgaatatctacacaaagatttgcatacaatcaaagggaacacccacgggatgccgtgtatgtttcccttccagtataaccatcagtggcatcatgaatgtacccgtgaaggtcgggaagatgacttactgtggtgtgccacgacaagccgttatgaaagagatgaaaagtggggattttgccctgatcccacctctgcagaagtaggttgtgatactatttgggagaaggacctcaattcacacatttgctaccagttcaacctgctttcatctctctcttggagtgaggcacattcttcatgccagatgcaaggaggtacgctgttaagtattacagatgaaactgaagaaaatttcataagggagcacatgagcagtaaaacagtggaggtgtggatgggcctcaatcagctggatgaacacgctggctggcagtggtctgatggaacgccgctcaactatctgaattggagcccagaggtaaattttgagccatttgttgaagatcactgtggaacatttagttcatttatgccaagtgcctggaggagtcgggattgtgagtccaccttgccatatatatgtaaaaaatatctaaaccacattgatcatgaaatagttgaaaaagatgcgtggaaatattatgctacccactgtgagcctggctggaatccctacaatcgtaattgctacaaacttcagaaagaagaaaagacctggcatgaggctctgcgttcttgtcaggctgataacagtgcattaatagacataacctcattagcagaggtggagtttcttgtaaccctccttggagatgaaaatgcatcagaaacatggattggtttgagcagcaataaaattccagtttcctttgaatggtctaatgactcttcagtcatctttactaattggcacacacttgagccccacatttttccaaatagaagccagctgtgtgtctcagcagagcagtctgagggacactggaaagtcaaaaattgtgaagaaagacttttttacatttgtaaaaaagcaggccatgtcctctctgatgctgaatcaggatgtcaagagggatgggagagacatggtggattctgttacaaaattgacacagtccttcgaagctttgaccaagcttccagcggttattactgtcctcctgcacttgtaaccattacaaacaggtttgaacaggcttttattaccagtttgatcagtagtgtggtaaaaatgaaggacagttatttttggatagctcttcaggaccaaaatgatacgggagaatacacttggaagccagtagggcagaaacccgagccggtgcagtacacacactggaacacacaccagccgcgctacagtggtggctgtgttgccatgcgaggaaggcatccacttggtcgctgggaagtgaagcactgtcggcactttaaggcaatgtccttgtgcaagcagccagttgaaaatcaggaaaaagcagagtatgaagagagatggccctttcacccctgctatttggactgggagtcagagcctggtctggccagttgcttcaaggtatttcatagtgaaaaagttctgatgaaaagaacatggagagaagctgaagcattttgcgaagaatttggagctcatcttgcaagctttgcccatattgaggaagagaattttgtgaatgagctcttacattcaaaatttaattggacagaagaaaggcagttctggattggatttaataaaagaaacccactgaatgccggctcatgggagtggtctgatagaactcctgttgtctcttcgtttttagacaacacttattttggagaagatgcaagaaactgtgctgtttataaggcaaacaaaacattgctgcccttacactgtggttccaaacgtgaatggatatgcaaaatcccaagagatgtgaaacccaagattccgttctggtaccagtacgatgtaccctggctcttttatcaggatgcagaatacctttttcatacctttgcctcagaatggttgaactttgagtttgtctgtagctggctgcacagtgatcttctcacaattcattctgcacatgagcaagaattcatccacagcaaaataaaagcgctatcaaagtatggtgcaagttggtggattggacttcaagaagaaagagccaatgatgaatttcgctggagagatggaacaccagtgatataccagaactgggacacaggaagagaaagaactgtgaataatcagagccagagatgtggctttatttcttctataacaggactctggggtagtgaagagtgttcagtttctatgcctagtatctgtaagcgaaaaaaggtttggctcatagagaaaaagaaagatacaccaaaacaacatggaacgtgtcccaaaggatggctatattttaactataagtgccttctgctgaatatccccaaagacccaagcagttggaagaactggacgcatgctcaacatttctgtgctgaagaaggggggaccctggtcgccattgaaagtgaggtggagcaagctttcattactatgaatctttttggccagaccaccagtgtgtggataggtttacaaaatgatgattatgaaacatggctaaatggaaagcctgtggtatattctaactggtctccatttgatataataaatattccaagtcacaataccactgaagttcagaaacacattcctctctgtgccttactctcaagtaatcctaattttcatttcactggaaaatggtattttgaagactgtggaaaggaaggctatgggtttgtttgtgaaaaaatgcaagatacttctggacacggtgtaaatacatctgatatgtatccaatgcccaataccttagaatatggaaacagaacttacaaaataattaatgcaaatatgacttggtatgcagcaataaaaacctgcctgatgcacaaagcacaactggtcagcatcacagaccagtatcaccagtccttcctcactgttgtcctcaaccggctaggatatgcccactggattggactgttcaccacagataatggtcttaattttgactggtctgatggcaccaaatcttctttcactttttggaaagatgaggagtcctccctccttggtgactgcgtttttgccgacagcaacggacgctggcatagcacagcctgcgagtcatttctgcaaggtgccatttgtcatgtgccacctgaaacaagacaatctgaacacccagagttgtgctcagaaacatctattccctggataaaatttaaaagtaattgctacagtttttctacagtcctagacagtatgagttttgaggctgctcatgaattttgcaaaaaggaaggttctaatcttttaacaatcaaggatgaggctgaaaatgcatttctcctagaagagctgtttgcttttggttcttctgtccagatggtttggttgaatgctcaatttgatggtaacagtaagtgatttgggtagaggagaggacataaataaatacatggttgttaaagctgatgataatggcatctgtgagccagaaaactctccttggatacgttttctgagaaaaaatagcatgaagcctaaagccatttcttccaaaaacaacattgcaacccttttctttacccttttgtcttttaaaataatcccagaacaccaaaaataaaaacaaacaataacatgtttatctttacccttagcaggaagatgcttggctggaactttgtgttcacagacttagtcattgcataccaaaaccatatttactggaaaatatcccaggtttctaaatgttataaaagcacaatagagttatggaaatgtttccatgatgaactgtgctgttaggattcttatttgctactcataaaaaccagagtttgtaataaaatggaagcatggtattcttttctttatgtaattgatggttattgaaaggtacttgtgaagaaaattattttaattggtatggagagcttgttacagtggtgtaccaaggttgggggtgagcctaccctttcgaggaggagtattttaatcaccaacattgtttagaatttcaagcagatggtgataataaaaagcagaccaacttttagttagctgtattgttagttttaaattattttcagacaatacactattgcccac

SEQ ID NO: 40 - protein, 1324 aa, Homo Sapiens
MLLSPSLLLLLLLGAPRGCAEGVAAALTPERLLEWQDKGIFVIQSESLKKCIQAGKSVLTLENCKQANKHMLWKWVSNHGLFNIGGSGCLGLNFSAPEQPLSLYECDSTLVSLRWRCNRKMITGPLQYSVQVAHDNTVVASRKYIHKWISYGSGGGDICEYLHKDLHTIKGNTHGMPCMFPFQYNHQWHHECTREGREDDLLWCATTSRYERDEKWGFCPDPTSAEVGCDTIWEKDLNSHICYQFNLLSSLSWSEAHSSCQMQGGTLLSITDETEENFIREHMSSKTVEVWMGLNQLDEHAGWQWSDGTPLNYLNWSPEVNFEPFVEDHCGTFSSFMPSAWRSRDCESTLPYICKKYLNHIDHEIVEKDAWKYYATHCEPGWNPYNRNCYKLQKEEKTWHEALRSCQADNSALIDITSLAEVEFLVTLLGDENASETWIGLSSNKIPVSFEWSNDSSVIFTNWHTLEPHIFPNRSQLCVSAEQSEGHWKVKNCEERLFYICKKAGHVLSDAESGCQEGWERHGGFCYKIDTVLRSFDQASSGYYCPPALVTITNRFEQAFITSLISSVVKMKDSYFWIALQDQNDTGEYTWKPVGQKPEPVQYTHWNTHQPRYSGGCVAMRGRHPLGRWEVKHCRHFKAMSLCKQPVENQEKAEYEERWPFHPCYLDWESEPGLASCFKVFHSEKVLMKRTWREAEAFCEEFGAHLASFAHIEEENFVNELLHSKFNWTEERQFWIGFNKRNPLNAGSWEWSDRTPVVSSFLDNTYFGEDARNCAVYKANKTLLPLHCGSKREWICKIPRDVKPKIPFWYQYDVPWLFYQDAEYLFHTFASEWLNFEFVCSWLHSDLLTIHSAHEQEFIHSKIKALSKYGASWWIGLQEERANDEFRWRDGTPVIYQNWDTGRERTVNNQSQRCGFISSITGLWGSEECSVSMPSICKRKKVWLIEKKKDTPKQHGTCPKGWLYFNYKCLLLNIPKDPSSWKNWTHAQHFCAEEGGTLVAIESEVEQAFITMNLFGQTTSVWIGLQNDDYETWLNGKPVVYSNWSPFDIINIPSHNTTEVQKHIPLCALLSSNPNFHFTGKWYFEDCGKEGYGFVCEKMQDTSGHGVNTSDMYPMPNTLEYGNRTYKIINANMTWYAAIKTCLMHKAQLVSITDQYHQSFLTVVLNRLGYAHWIGLFTTDNGLNFDWSDGTKSSFTFWKDEESSLLGDCVFADSNGRWHSTACESFLQGAICHVPPETRQSEHPELCSETSIPWIKFKSNCYSFSTVLDSMSFEAAHEFCKKEGSNLLTIKDEAENAFLLEELFAFGSSVQMVWLNAQFDGNSK

SEQ ID NO: 41 - DNA, 42056 bp, Mus Musculus
  misc_feature (15014)..(15214): n is a, c, g, or t
  misc_feature (19853)..(19872): n is a, c, g, or t
  misc_feature (26609)..(26628): n is a, c, g, or t
ggctccttccatctcgctggcgaacttaagcgggcaaaacctgcaggggagtttggcctggtgggagcctgcttcccagcctcagaacctgcccttgcgcagatgcagacatgagctatcagcagccacagctgagcggtcctctgcaggtaaaactggcaacaagggcaagagctcaacatcctccttaagtttaatgctggggtcttggtttggcaaaaagggatagatctgacttaatctgacctacaccgatttggcaaacacttttcaataacaccaataacctctttaatttcataaaaccgtgtggttgactcctaacagactctggagttgggtcaaagcagttgggcagcctcaacatggagacttgtgaagacttaaggatagactttaagttcttttggattgctggccattcttgttttccctccttattgatgtattattaacactataggcataacttgatgtcattactatgtttgaatcctgcgttgcttatttatctgacttttttttcgaactagtaaaatcgttattttatctattaaaatagagagagacagactcgagtgacagagaaagcctgatctccggacatgaacacggagggaaatctagtcagtctgccgctgttttcaatgtagtcaattctgttataggatctgggataataggtaagccacccgtgtctgcttggttctgtttatgaagtataaagacaagcttttcaaagtgttattatgatgctagcattcagtaaaacttcaatggggttttcttccacaaaagcttttatatttttttccatcatagtaatgatctgtcctctttatgcggaaattgcactgtttccccccccacatcagacaatagcatcctccagttggggagaggctgcacaggggccggggaaaatgggcttttcatagattaactggtcagtggatcatgtcaactaatgcatttgtttcttctttctgaagcagactgtattacaaaaaccatcttagtgtcagtgtgaaacttgcagattcctgcgtatattatgtgtacaaaagcttaatgggagacttttaagaatcctatgaaaattaaactagataatatctccttgtgcacctatatgatcttaaatttaaaatatgagcttatgaaatactgtttacatctagttattaatagaattcatttacagcagtgcttacaattggtaagaatagcccctgttatcccaacaaattagaagcaagggaaagcttctataaaagtaaaaactttaaaagctattgcattccattaatagaagcagtattttccagtgtttattattgtttttataactggagacattccatttcagaaaaggcaaggaaaacaagagcctatctattgcaatacccaccaaatatgtagctgtttaactataaaatttccagattttaatttacttaaaagtatgagtttatcaaatggattgtttttatttttatttatttcttatttcattttatgtgtgtgtataggtgttttgactgcatatatatataccacaggtatgcctggggcccacagaggtcagtagagggtgtctgataacctggaacagaagttccaggatggatgtgagtcaccatgtgggtgctggaaaataggtatatggtaagagcaacaagcactcttaactgctgagccatccctccagccctgagttaatttccttttttttctttttttccacaagatgctgtgatttctggcttcacattaatccatatacacatttttaaaaaatgaacaataacttggaggttcctgaggtaaagcaggagcaagcagggacacatgcttgtctaaaaccctgtctccgtgtatcacgggagtatgaaccgttcaacctgacagaattctagaattcctgatgggaaaacttttccagggtaatccagtttagcaaagtcaaaatgttccccttcactgccctcagcagaattatttaaaagagattttttttctgaaaaagaaatgttctgggtagaagtgcttaaattattttacttgggatattttatagtctataatctaaaatgacccatatgtgcaaagcagtgaaaaataatgttataaaccccattgcccttgagaaaaagtcactttgctttcctgtccctccgcatgctctctattttctacatggttcccccatttgggctccggaatcagtcttcactaagatcctacagctgtgccctggtgctttccacagcagcatggaggggaggggtggtccttctccgaggagtccagggcactaaccatcacccggagatgagcattgtctatgtgaactggaatcaggttttcatgtgctgctttttaattcttcttctgtcacctcatgcgctggctttcttgacaggtccttaagctaatgacattccattctgaaataagtgctaatatgctgatatttgattttggactaccccattcccacatcacaacttttaaatcacttatataattgatttttaccttttatatatgaatcgtgagagctttttgcattttctggatgcctttctgatgtgaggttggggcattttatgtttttccaggattgccttattcaatgaagcaagctggatttcccttgggaatactgcttttattcttggtctcatacatcacaggtaagtagcatataactgcatatccctacaacttaagttgtgcaatgacttcttcccttgcacaaatacatcctgcaattggatttcctacttcattaagaagcgcatcaaagcggcctaaggaatttaagcaccacatctgaggagatttgctttcctccctaatcctttaaacagattagtaagagtagcgcaaagctatatcacaaagcttaaagctggtcatgtggttttttcacttcgagcagaacatggcggatgagaaagttgtttccaagactggtggcagctgagaagacactactccccagtgcccaaggcagagctatgtggcaggtgcatgcagattggcagccattgttggctgtgtttgtgtaggtgatgctgggggtttgggtgttcagctggcaaggccagccccttctctccagtgctgcccgtgtgtgctgtgtctgccagtgcctgcctgcacaacagaaagctgcttccagattgctttctcttctactccccgctcatccaacatccatcttcgcccacaggttgccactcttcaggtaaaggcaagttcagcactcagaccaggtctccttgctataattttcaatccagccagttccgccatcccaccggcttactttgtaaagcttttctctgacttaggatcactgtgaaagagccagcagtcattaacagatacagagggctttgtttacatttttttgtttggtgttgttttgttgttgttgtttcactgtggtaacagttatcagtggtgatctagatggatgccttgtaccaactagtggaaaacccctcaactgtcccctctttgaacctatggcttgggcctcaagaaaccctcttcctacgagtttatacactttcctcaatccctagtttcacaagggattcaggcaattactgttaacagtctaaaaacaagtcaaactttgtttcagccacagggaaggcttagtgcaatgggaggtacacttggggttcccgagatacaccatcaatcctggggcgttgctagtctccacccaagactccctccttggcacacctgtttcttctgccttatccagtcattccatgaagtaagtgtgtgtgtgtgtgtgtcccactgagtttaactacagtaccttgcatgagcagaggcaggggttattaatagaaaatggacaacttaccattggttataccactgaagaaaatgataacctccgttgctgcccagccaccattaacaaggaagggtggagtctcaggagcctctccccagtgggcatgatggggtgataatggacccctatcttgtgcaggtggtaaagtgttcatgagtgcacgtgtagtgtgcagaagaccatgtctcatagcccccttccctcctactggctcctccattctttggctccctattttacaatgttactgaactgtagaaggggcagtaaatatgtctcacttagggtcaagccctcaactgggattctatgcatcaactgtcgccagctcctctgaccagacctgaatatgcatagaaacgttaatctatgcatacgaatacaagtatctttaaaagcctagtcatttttttaatttcctgcttcccagtgagtgctgacaaatatttaatttccacccaggtgtattaccctagctttagcgtattgtaaacacataattataaatcagcaggcagagaaaattaaacatcccatctgtgtgtcagggttggaagaaaatgaatagttcggtaaacctacatcctattacatctaaataagtcataatggaggtagcatgctccattgctggcctacccacggtgcacagtctcaccaaagccatgcactataagcttactctcaggagtaatgactgaccgcgtcacttactatcagcatccaaatccttaaagaattttaatcaagcaaagattcccttcacaaaagtcaaacaatttatatctcaagatattcatttcctttcttatgtttgaagagcaaaatctgcaagaacagtatactatttttttcctttaaattaacactaaaattgtttttttttaatggaattagtcttcgtttttaaaagctacggctctattggacaacatagtaattaaaaatcttaagtcttcaagttaggctcccacttaaatcctgtgtccttaactctgtggtccttattagccatttgaccctctgtaagttacttaggaacactaattaaatgctggtttatctccagatttcttttgagacagaatctcacttccaggctggctattgggtagaagagctttctatttcctccacctcctgagtcctgagattacaggcacgggacatcgagcctagtctgtacattgctgaggatcacacacaaggtttatatatgatagacaagcactcaacaactgaggtacatctccagacatctatggtttttctcttgcctatgcatatgtcactaggtctcactgtgatatcctggctgccctggaacttgctatgtagaccaggctagcctcaaactcacagagatctacccaccactgccttgcaagtgctagtgttaaagctgtgtgcatgtgtgtatgcatgaatatatgtgtatgtatgcatcacgtccagccccctttgctttcctacagcctctgatgaagaaaccttcagatcaacaggtagtaaatgttggtcgttctcctactgcaagagttttggagactcctaatctcgctcctctctgctacacccggcaggggcacgagagcacattccaagagcagttctgtagttttgaggaaactgaggtctcgagtcccttttcttgttttcttggtgtcttctcacaggctctcctacaatccctttctcaggccatgttccaatgtcccagcatggtggcacttgcctatcatctcagcactcaggaggctgaggcagagagatgaggagtttaaagtcatccttggatgcatagcaagtttgagctcagcccgggctacatgggcatcctttgttttctaagacaattcagttgaagcatgcaaacgctttgtatcaaaagctttagtcaaatgcattttatatcaagtgatttgtgttttgttttgtttcactacagacttctccctagttttattgataaaaggaggagccctctctggaacagactcctaccagtctttggttaacaagacctttggctttcccgggtacctgctgctctctaccctacagtttatgtaccctttcataggtaagatagatggctgtgaagacagatgctacaatacttggtactagcatggtcttttttgaatgaataacagtagctttaatagacatttgagagtcatcaaattagtagttgtaatgttgtctaaattaagtgtttgcatattaactattttctttctgattttctggtaatttcaacctattctgtgactatattttctaaaatgaatgggggtttggttaatgttttgattttccttaggggtcctattctctccccccaccccagtcatcagaatatatataagtatataacgtacatacatacacacaaaaatatcactcatacacacacacacacacacacacacacacacacacacacacacagaggcatgcgtacatccacatataatcttgtatacacacacaaatgcacacaaacattgtataactacaatgatttgggatttaaagtgaatgacaataagtctctcttaaggcttaatacagttatcttttttttttaagatttatttatttattatacgtaagtacattgtagctgtcttcagacattccagaagagggcgtcagatctcgttacggatggttgtgagccaccatgtggttgctaggatttgaattccagaccttcggaagagcagtcgggtgctcttacccactgagccatctcaccagcccttaatacagttatctttgttttatttattttttttttgaagacataaggatttgggggagttgtatacccatgtttgtactagagttgtgaaaatgctgaccactccttcttaaatagataaaatgttcatataaatgaatgaccaaatttagttcatttataaaacgtcttattcattctttgaaaatttcaatgttgacttcatattttatatcaaaatcaaagaagcttggagtaagtctacatgtttccacaaaaatataaaatatgctccctgcatttcaattgagagtattttgaggggggtgtgcctttaaattttactatggttatttgatttcaatttaagcagcacaatatgttcctgaaaaagtgtttgcagactaaccttcaacaacaaaataaatcacattttaaatgagtgtcaaactcaattcttgagaggattctaggataaaccaattataaagtgagaatcttcccgaagctcaagttgacactctgatgtaaatctatcaggtgtatacaaccaatttaagcttatccctgactagcttacaaataaatgtgactcagactatggttattttatttggctttgacaattactgggtggtcaaatttactcttctaactgctgacctggctacctcttcagtggtgtaccccagatacttgctgtttctcctggccttgtgtccatcttcaatctcccctcatggcaactgcctctttctccttcctcctcctcttctcatttccctcccccaaccaggtcactccaaacccacctatagctaatctctccagtcattggctgtagccaattttatttatttatttatttatttatttatttatttatttaaaagatttctttattgtagatggtccttcctgcagtctcggctccaaactttgtctctgtaactccttccatggatattttgttccccattctaagaaggaacaaaatatacactttggtctccatccagagactgccccacccagggacccatcccataaacaaccaccaaacccaaacactattgcatatgtcaacaagattttgctgagaggaccgtgatacagctgtctcctgtgaggctatgccagtgcctagcaaatacagaagtggatgctcacagtcatttattggatggaacacagggtccccaatgaaggagctagagaaagtacccaaggagctgaaggagtctgcaaccctataggaggaaaaacaatatgaactagagctcatgtctctagctgcatatttagtagaggatgacctagttagccatcaatgggaggagaggcacttggtcttgctaagattctatgtcccaggatagaggaatgccagggccaggaagcaggagtcagtgggttggggagcagggggagggggaagggcataggggatttttagagaggaaactagaaaggggaaagcatttgaaatgtaaatgaaaaaatctaataagaaatatttatttacctacttattattatatgtaagtacactctagctgtcttcagacactccagaagaggcatcagatctcgttacagacagttgtgagccaccatgtggttgctgggatttgaactcaggacctttggaagggcagtcagtgctttaactgctgagccatctcaccagccccccctgccaattttatttaaccaatagttttaaatgaaggaacaaggtttgcgcaacaaaagcttgtaaacacgagaagtcacttgtagccctagacctttgggtatagaatttagcattacaatacacagcaacagaacaaacctcaacaaacaagttatccttaatctgcacataatagaaagtctatataatacatgttaaaatatgtaaatatttaaaaactaataacttctgctgtttagaatatgcaagataaaatattacagccttatcaatgaccattcttgtccctgtgctttcagctatgataagttacaacataataactggagatactttgagcaaagtttttcaaagactcccaggaggtaggtaaaaatgagaaatgtgatagatttgcataagcttatgttgcatagccatcacgtaatttataaacatttataaataaaatatttgatgaagggttgcactacctcacagacttcgcagttcccgtaattcacatccattccaggccacagatctatattagcttttaagagttgctattttttttctggacatggaggtgcatggctttactaactccaacactccagatgcagaggtagatagatttctccaagttccaagtcacactgatcaataaagtaagttccaggacagccagggctacatggaaaaaccctgtccaaaaaaaaaaaaaaaaaaaaaaaaaagctagttttcataagcttccattttatttctttatagttttgctttttcattttttttttcagattaccaaggaaatgccaccaaagaacatttagttttctgagtcttgcttctcaaactcagtgggctgtacgtagatgagatttgtcactccctggagctctatcagtaatccattgatatttctattgttaggagtattccatactatagaaatacaaagtaactagtgtgtcactcagctaagggacatttgtattgcttccattgtggggcaatgtgtatgtatcacaaaccttcttcctgttcggtatgttatcatgtcctggtgatgagtgtgattcaggggcatgtgtctggttgccttctgacttcggggctattggggctggagagatggctccctggttaagagcatcggctgttcttgcagaagaccagggtccaattcctagcacttatatggtggctcacaaccatctgtaaatccaggtccaggggaatccaacaccctctcctggcctccctgagcactgtcatgtacacaatgcaaagacgtatgtacagcaaaagagccatgcacattaaataagtaaataaataaatttttaaagagctctttattcataggaatgtaaaattctatgacgtcatatgaagtataagctaattttttattattatgcttatattttgtggtatctttctttctttcttttttttttttttagctcacacagtctttttttttttaagatttatttttttacttcactaatgtatatgagtacactgtagctgtcttcagacacaccagaagatggcatcagatccctttacaggtagttgtgagccaccatgaggttgctgggaattgaactcaggacctctggaacagtcagtgttcttaaccactgagccatctcaccagccttggtatgtttctattttaaaatgtttttttgttgttgttgttgcttattaactcaaaacaatctttatatatgatttatgttttttaattcattgtttaggtagttaatatatcaccaatgtgctatttatagctgcaaactaaataatatttactatattttagttgaccctggaggttggtttattagtcggcacttcattattgtggtttcaacggttacatgtactctgccattgtcactgtaccgagatatagcaaagcttggaaaggtaatttttacattttaaagatttatttatttttatttttttatgtatacaagtgttctgctttcatgtacggatgtgaaccatgggcttgcaggagccagaagagagcaacagatctctggaactggagtgtttagagagggttgtgagctgccatgtgggtgctggcaatccatgcccggtcttctataggaacaaccagtactcttaaccactgagccatctctccagccccatttttatattttaaatagccccgagctttatggatttacagcctattcaagttacaatagcctatacaagcatgcttgtatgcatgtatactagttacaagtatgcttgagcaaactgtgatcagctcatttgaggaaactggtggttagctatgaataaaatatgttcttcctttttctccactaaagtaggtaacatgatatcagacaataattttaaatttagaaaatatagagaactatatttaaagcaagtctactttattagaaagtgccccatccttcccatggataatttaaacagttaagctaaccgtgacaaagaaaggttgagtgtttgaagtcataaatgcttaatcttaggtaacattgtacaacttatgcatgtaacattgtataatatgtgtgtaacaaacttcctgtggtaccccctaatctatattatgttttgtatatcagtcaaaattaacggtaaatcaaattatcccttaaatgatgtaaaatcttttaatttgtaaattccaatgtctattatgcacattttccactcggtgaatttaaatatcaatttgttgattgattaattgttgagaatttgacctatgacactaaagttttaaaataaaattaactaaataattatttgacttacccatagaagcttatttatatcaactatctattatctgcctgtatattttaaatttttattttatttccatgagtacactgtttctgtcttcagacacaccagaagagggcatctgatactattacagatggttggggccaccatgtggttgctaggaattgaactcaggacctctggaagagtagtccttgctcttaaccacagaaccatctctccaggcccatatctgcctatttaattctcttattgccaaggaatatatctattttacccaagatataatgggtactatgtctacatggtcatatattacgataataattaattatgagatacttttacagtctgctttgaaaactgcaaccatcaagcacatcacaccccttgcgttcatttttgacatggtatatccagtgatgaagccccttcttccagacagatttgcacacagagtcaccattcctgagtattcttaccaccaggcttcccgtccttaacatccacccagagacaaggaaggatgtattaaaaggcaggccagacattgctgctcatacctgtaatcccagcatttaggagctggagggagagacaggcaaatctctacgactttgaagcctacctgatctacccataattctaggtcagctaggactatagaatgagatcttgtctttaaaaaaaaaatagtgcatcaaaaggaaaatttttatttgccagttattctatgaatcagtaatcaatttttctcttcacaagttcaatatagatatataaatattatcttctgagagaggaaaggaaaaacattcatggggaaatggtattactgaacatagtaattatcccctgaagatgtcatactgaaatcccagtgaacagagcacagcactgcctccctctggaatattcctgtggcatttgaataccgcccctttactgtctagctatgaacttcaatttgctaatttttctccctgttcttcacaagacctggaactcatcatagacatgtatttcaaattaaacattaaaaacttagaacccaatgttaataataatcacatgaaacaaaagcattctgagactttttttcctttgtcatagaaaccttctcaaatgtgcttactcatttttaaatgaaaactcaaaacacaaacctattggaataagtgtacatacagagcagaacgcatgcacaccctcaccagattgtgttttaagcagatgaaataggcatagcgccgagaggaagacaaagaacagacccagaaacagagcaaagggtaaactgcaccagacaaatagactaacatagctggagagcaaagaggaaatggcagaccaaaaaaaaacaaaaaacaaaacaaacaaacaaacaaaaaaaaaccaatgaagatgtgtgtatgcatgttatgttgaaagaaagggggacgataaaaatagaagaagcaattatcgataggaagccctgtaagtcaatactaaaatggggtctgaaggaaacaagatattttcacttttacttttctaagttaaaagtcctcactttggctgggcagtggtagtgcacgcctttaatcccagcccttgggaggcagagactggcagatctataagtttgaggccagcctgatctacagagcaagttccaggacaaatcctcattttgtatcctgagccagaagtagataaaagctcttaaagctttgttgtaagatcacagtagacacttgattctctgtttgtggcttagggacaaaaatcatgttatgataagtagtctacatacccactggtctatatatatataaacaacttgggaactggataaagacagtctatgaataagttcatagatttttgttattgttctttgtctttttgaaattctattttattggatattttatttatttacagttcaaatgttatcccctttccctgtatttacagttcaaatgttatcccctttccctgttttccctctgaaaacccccaatcctatccccttccctctacttctatgagggtgcttccctacccatccacgcacttctgcctcactgccctagcattaccctacactggggcatctagccttcacaggaccaagggcctctctttccattgatgccaaataaggccatcctctgctacatatgcaactggagccatggatccctccatgtgtattctttggttggtggtttagtccttgggagctcaggagggggagggggatctgtttggttgatattgttgttcttcttatggggttataaactccttcagctccttcaatctttctcctaactcctccattggggtccccgtgctcagtctgacggtcagctgtgagcatcagtgtctctattggtcaggctctggtagagcctttcagaagacagcttctgtcagcaagtacttcttggcatcagcaatagtctctgggtttggtgtctgcatatgggatggatccccaggtgggacagtcactggatggcctttccttcagtctctactccattctttatccctctatttcctttagagaagagctactctggtttaaaattttggagatgggtgggtgaccccatcccttaaccaaggggctgtgtttaacctctctatatggtctctacaggttctccctccccattttgtttataggttttttttaaatggtgcagtatttttgcataattcatctgcatcctatagtgatgatgtctttgcgtttctttttgcagatctctttcatctctacaattttaacaactgtaattcttggaatcgtaatgacaagggccatttccttgggaccaaacatgtaagtgttgctgtacctttgattttacatcgagatttgcttaaacatagcatattcaggaacataagaagtgaaaagatgcagccagatgtaaggaggcagccagatcgagatttcaaagtcattttcagctatgtagcaaggtcaaggccagacaggagactcggtctcaaaataggaaatcagtaaggaaaaagagaaaaaaggaagaaagaaagaggtcacacacacacacagctgtaagaaaccctatatagttagtacctggaagaatcagagaaagacttacactcagtaaatgcagtgagagacctgcaatgtactaaacactatagaaggtaatttgcgctgtgtcttaagcagtacaaggaacactgtcttctatgtatggtctctaaaaaaagaaagggcgagggaaaccagtgcatacatctgattggtagtgcagtgcatggggaatctgtttccttcttgattaattgttgcttattcaggcacatacttatgaaaagctccttagcttgccagaaaagaatgctcaaaacaaaaacaacaaccccccccaaaaaaaacaaaaaacaaaaaatcacaaaccaaacaactagactcaagtaggtaggaaatctgagactgggtgccaacatgctttgatttaggagagtctcttgtccccttgctacaggtcatcacatggcaaccagctatgttgttcccctcctgatctcatctgagccttagtacctcccaagggccttcttgtcagacaccaccacactgaaatatcagggctttgccataaggattgggacagatagctgggaaaaggtagctcctatgcaaagagacccttaagtcattacccaaatcaacaaaaggagagagagagagagagagagagagagagagagagagagagagagagagagagagagagaaaagaaagaaagaaagagagagagggggaaggaaggaaggaaggaaggaaggaaggaaggaagggaaggaaggaaggaaggaaggagggagnnnnnnnnnnnnnnnnnnnnnnnnnnnnnnnnnnnnnnnnnnnnnnnnnnnnnnnnnnnnnnnnnnnnnnnnnnnnnnnnnnnnnnnnnnnnnnnnnnnnnnnnnnnnnnnnnnnnnnnnnnnnnnnnnnnnnnnnnnnnnnnnnnnnnnnnnnnnnnnnnnnnnnnnnnnnnnnnnnnnnnnnnnnnnnnnnnnnnnnnnagtggatgggttggtaggggagcaaatggtaggtgggaggggtagggtgctcgtggagtggggacctggaaggatggcaacatttgaaatgtaaaaaaattaatgcgaattgaagccaagccaagccaagccaagaaaagtaaggggaaaggaaaggaaaagaaaggaaaggaaaggaaaggaaaggaaaggaaaggaaaggaaaggaaaggaaaggaaaggaaaggaaaggaaaggaaaggaaaggaaaggaaaggggaagggagggatggagggagggagggatggatggagggagggagggagggatcactaatccagccctacacacctgtaacagctttgaaacatacatgatttggttcaggtcaacatgaccatttattctcccctttcagaaggctctcattaaacgcctattttttctggtgattttgctgtgaactgggagaaaagagcaatgtattatctaatcagcatctactgcaagttattcatcagttggatgttctaaaaccagaaggaaaacaaatgccatacatgtgataagtgtgaggcagaaacatgaaagaggggttagaggtagtgcccaaactagggagggcatcacgacctgcttggatctaggcaagctttcctgaggagggaacagtgtgtgatctgagtatcttcacagatagattagaacttttttagagagataagtggataaaggccttgtagtctccataaatgtgcacatggaaacacatgggtgtatgtccagttcgattgctgatcattcggtattgactgcattgatactatattccatcctagttttcaaaaactgaggtacaggaaccagaagatagtcaatgggttaaataatacaataagtaacaatttaggcaaaatggtgatgatatgaaacataagtataatgactgaaactttcatactgagaagtaaatctaagcaggcatacataataaaaggttttattcactggatatataaaacactgtgagacagtatcaaagaggggaaaggaagagagagaattgggggacttgagaagttgatggatcagaactcacttatgctccaggaggggcaaatgatgttcccaaactccactgcacgtttcactcacctgactggcttaaatcactgatgtgccaactacgcacccactgagcctctgagagcatttgcttaggggccaggcaactgtactccgtatggaacaattagaggccaggagccaggagctagaaagaacctctgacccagagactggccacaagtatacatcaactgcgccccatcccccacctgaaaccagggctttttgtttcttctcaatgtcggtggttggtggttcattcttcaccttgtgttttccagtatttatttttatgtggaaagtgtcatgtgacagactattttgaatacaaagaggaaaaaaaatatctttgctctcaagggtctcccgtttagtggggaaataatgctctgtagataactatcagggaaactatcaggcagggatgttcacttcctgtcaggttaaatgagctcattttgtgactaaagagcttaaagcactgtttgtttgggttctaaacaaaatgtagccttaatttcctctgctggtgatataatattttatccgggactagatttttacagtgatggggactatttaactctcccaatatttagatgtctaagaagtataccttttcatacggtgccacctcctatttctgtttgaatagctctgcaaacaactcctgcttgccctgtgtacaaccaggctaatgaaatctctgtagaggttggcacagtagctagccaagcaggcttctttctggaaataagacaggcaaagatgctcatcatccataagacatgagaaatccaatacactgtgtgtgctttccttcgttttcagttcagatgaatggtcagagaagctgtagattcctctccccctaggtcttctaaaatggtatttgaaaaaggatctttaaacccactatcagaagagaggcaggtctgtcacagctgctggtattgaccttgttaccatggaaacacctttttagtggttgtgtttaaaaataaaacacaattcaatttccttttccataactcatagggccataaattctgctttctggtatgatttcaaatagccacagcccaaccactctctgtttctcttggaaattatgttcagttttattgtatcttctaggtctttgctttataaaaaattgaggtagcaaggcaatttaattgttttccagaaagggaacaagtataaaaatgcaataacacacttggggttttttttttcctattttttctaacttaaataaggggcatttaaaaaattatttatttggaatatgattaatatttatatcttacaatcagtgtggaaatgatcacatgtagccaaacttaaaacgtttttatatgacatctgttatggcattttaatcaataacagcattctcagcataactggagtatatatgtctatactgtatacagacatttagatgcacacatgtactctagaacctggcaagcaacactaatttccttactcagtcattctaagcctaaaacgctattatttaataaactatataaaattcaagagaggatcggggggaaatgggttaaaaaatatgcaaatgtacatatttgagggagagttttgattagttctgacaaatgtcaatcacttaactgttatggcatatgaactgttgctgctttcgttgtaaatgacaatcaccaaactgtaatctgactgcagtaaaagacaatttattaactcaaccataaaggttcaaggttggtgctgggtagggtaatatcggtctgttgtatccaggagctcagttaatgaagtcagaggtggcccttctctatctccatgtcctttgcttactcgtgtttgaaatgcctgcttactgtcttaagataacagcaggccatctcaacttatacttgctcacgtctacgtcctcaaaaagagaaaatttccctctcaggtgcttccagtgcactagaaggactatccccaattggctcagttgaggatcaataaggattcctaccccaggatctgtgctgagttgcttgcgatctggtgctcggtacccacccttggagcgaaaaataggctcacatcgatcgagtgtgcacccagactgaataggaaaatgagtgtgcccagaagacatcaaagcagtagtggttagaaatgtggatgggccagtgtaccctgcaaattacaggacccatttagattacaggggttgtgttacatggtatgggaagaacacacaacagaattgaagatgtgaatgataaatatcctcatgaaaaaaatactcctattgaaacctggagaaatggtttaatgaaatttttaaaaagaaaagaaaaatcccacatgtttctaacaaagtatttcatgtcatgtatgtacttataaaccatatggtataactgttaaaagttatttcagtagaatacaatgaatctagacaaagctctctttcttcttctgtcttcccatcctccttatttgataaagagtatcaaatgaggtaaagtggtgggcgaatctggcctaaggtgaaaaaagagctaaaatattttattttgttttaaatgtaggaactattgagcaaattataggtgaatcaaaaaatcaaaagatgaatctaaagattgactcatgttggcaggagcgggtgagacaaagtctcactatgtagctctggctgtcctggaactcagtatggagaccaggctgccctcaaactcacagaatccgtctaactctagctcccaaatgctgggattaaagttgtgtgtcaccatatccggcttctaggaactcttgacagcatttggtgcattgtttgcatgatccttaggtagaagctgggatatccattcttgaaagtgtgacctaaggacacagagaggaacagttggttttgttctgaaggtcaagtaggcaatgtgagtttcacaccaggagctacggatgctgtcctggaatggtgatcgggaacggattcagaacttgagattttagctttgtaaatttggagcttttaccaaaaggaattgagaagagttctctacttagaaataaaatgatcatttttcttgttgaattttctcttttcacctcttaagcatcttcttgtagggtacttgatgtctttcatcttgctacaagtacccagagaacagaggtcacacttgctctttcatactgcatgcttagctctccagaatgttcagcccagacttcagtgctcagcaaagaattgccagatcaccagttggacggctatcatatgcctttttgctttaatcagttcatccccaggtttggccgaacacaatttcaatataattaaagaataggaatcaacccgaggtaatgaaattttcatataaaagtatttactatcaaggcaaacttttttaagtttactttcaaacccagatcataatgaccactaacccccacttttctatcactagcttcccccactacatagatactatgtttaaggcataactagagttttgttgattctgggtaaaagtnnnnnnnnnnnnnnnnnnnntttcttgttgaattttctcttttcacctcttaagcatcttcttgtagggtacttgatgtctttcatcttgctacaagtacccagagaacagaggtcacacttgctctttcatactgcatgcttagctctccagaatgttcagcccagacttcagtgctcagcaaagaaatgccagatcaccagttggacggctatcatatgcctttttgctttaatcagttcatccccaggtttggccgaagtttactttcaaacccagatcataatgaccactaacccccacttttctatcactagcttcccccactacatagatactgtgtttaaggcataactagagttttgttgattctgggtaaaagtctgcttggagtatacaaagaaatcttttgctaaaccatagatggcttggaagagaccaagatgaagggaagaatttgctgcagtgtaaaattcttgtcttcttgtcgagctgacagagagcggcagttctgaaacagaagtgtggacagataaagctcctgttttaattgggctatttttacagcccgaggtaagggcaaagggagaacagaagcctggaagaaggctgactataccaagagtccaggcacaggataactggtacagtatatgtacatggatagtagacatgaagaaggaggaacctttaagctgataaagttaattagacttagtgactatgggaaggggctaagggagcaagagctgcatagagtgatgattgataccaaggtttttagcttaaacaactagatttataggtggtccagaactcaccaccaaaggctgaaacagatgagtctagtgtcaatcaatgcctattgagtcagttgttctaggttatggggctacaaaggtagatataacccagtcgccctctgtggaactattaaagtttattgagggtagagttgggcatataaccatcagagatccaaagaacacttataattctagcaaatatttatcatattaaaaaattacgagtctggggagagatacttcagtcattatgtgcctgtagcgaaagcatggggacctgaattcaaatctccagagtcccttttgtaaagctaaattattggtgtatgcttgtgatcccagcactaggaaaatggagacaggaagatttctgggctcgctggccaaccagtctcaaccaatccaggttcactgaaaaaaaatccaccccctcccccccaaaagatagtaacatcatagcaggcagccgttgaagagatctcttaaaaactgtgataggctgggcagtggtggcgcatgcctttaatcccagcacttgggaggcgaggcaggcagatttctgagttcaaggccagcctggtctacagagtgagttccaggacagccagggctacacagagaaaccttgtctcgaaaaaaaccaaaaacaaacaaacaaacaaacaaacaaaaaacaaaaaaaaacccaacaacaacaaaaaaacccaacaaaaacaaaaataaaaaacctgtgaaaggatgatgaaatattgttctccacaacagctgccttccagcaggtctgcaaaaggagaaaggcttagctctattgaaggggcaggccactgagagtctgagcaagccccagtaagtataacgttaacactcattagacttttctctttttgctggggtgaggtcacaagggagtgggtgggcagggaaggaagtgaatgtggtaggggtgtatgatgtgaaatcctcaaagaataaatagaaatattatgttgggggaagaagggtatggtagaaaagtgaccgaggaagacactggtgttgtcctctgacctttacacactcatgttcttacacacacccataatggtgttcttcaaatgaatacacaaaacacacagcaacagcaataatgatgctattgatggtttctgaggtaagatcctactctactccctcccacctgcttgtttgtgtgaaatcaacccagcaagagcacttagtgaagagtcggcaagggaatcaaagattagatgataattagaatcaaaggaagttgatatctcaagtgatgaaacatgtccatgattacatgacttgtttcacgtgggtcattttttttctttgtgtgtgatttttaaaaaaagatttacttattattatatgtacgtatactgtagctgtcttcagacacgcctgaagagggcgtcagatctcattacggatgtttgtgagccaccacgtggttgctgggatttgaactcaggacctttggaagagcagtcagtgctcttacccactgagccatctctccagcccgtgggtcatttttttgtaagaacaaaagtaaattctgtcaccaccaccaccaccccccaaaaatcaacattaagttttctgaaaatttaaatcaaagtttaaaaattgtatttaaagtcagtgaatccattttgacattgagagtaatcacaagggaggatttttttttttcctgccagctcatgtcaaacacagatctgtatcaaggagtctgacacaaatgcgctgggagggagcggtggctgaggagccagctggtgccgagcctggggaagtggtcagctctgcctgtcacttagagcttgtgctatgacagaaaacaggaaacgctgagctgtgcctaggggtagccagagcatttaactctaagctgtgtctgattgaagcagttaatttagagcaggttctgcctacacggatcactcggaagcatcctgtgctctgcggaagagtttgagtgtgcgctaccagaaggtacgaggtgttctgagcctcctggcccagaggtgcagtgtcctaaggtccagcaggaatacctcgaagcttggttgttgttttggtgttatttattagaaacaggggctcaatatatagtctaggctagcctgaaatttgctttgtagaccaggctagcccaagcttacagacatccacttgcctctgcctcctgagagctgagatttcaggtgagacaccatgcccagcctgaagcttgtttttaatcacttcataaagacagggttgtttggtaggacaacatttctgatccctcggccattatgaagataacaaatttaagtttctaatcaatacaagatgcaggactccaaggatccaaaccatcacccacatctggcagctcaccaccagctgcaactccagcaacggaggagcttatgtcttcttctggcctcttcaggcatgcccatatatgacatatgctctcacagacatacatataagtaaaaatgattaaaaataagttttttctttaaaagcatagaggactatgtatatagctttgtagttagcatacaggaaaacctgattttgacccccagcatcccccccccccaccaaaaaggctaaacaaaaattatataattaacatttgttaaggtttttttttatgtaaaggaagcaatcatttctttttgaagcactggtcattctacggctgcaaactactctataccaagcccaaggtcacttcagaccttgtaattcatagacactaaagttttcaaaatgaagtcccttgccttctcttactcttccttcctacccccttctcccttttccctgcttcattccttctttcactttcctgtttgctggtttgccctgtttgacttttaggcttaatcccttttgttaaccttcttccaaatgctcacacaagaaagatactgggtcaccctgactggcttcctgttctgctaagccttctagagagatcagcctctcagtttgttcctgtaccacccaccaccaccctaggatcccacccccatcccccacgctccgcctcttccaggttccagacactctctctccaggatcccaaagcaccctgtttttctttgttttccccttttattggcacacccagggtagctcactagtgtctgagccccgcccactcccagctggcatgacctaagccactctttctcatgttgtgtgtcttcctcatgattctccacagttatgacttaaacatccaatttcttttcacaaaatattttctcctcagatgtctcttcttttagtaaaagattctgggatctcaggacagagggggaaatccatgtgtcctatccttgtttagttatataatcaacaaactgtacgtgtgtgtgtgtgtgtgtgtgtgtgtgtgtgtgtgtgtgtgtgtgtgtgtgtgctggtacctgcggaggccagagagatccaatatggatagtgggaagagaactggaatcctttggaagaacaggaagtgctttcaactgccaaatcatctctctaggcccaggttaaaagttttagtattggtttacatggaggtgtaagtgcaaattttattatttcaaagacattttatgctttagaaaagttatttctctttatgtggagtttatactctgctgtgatctaatggaaagggatggtatattagtcagggttctctagaatatagaatatattctgtatatattctacagaatgacattttctacagaatgacttacaggctgtggtccacttaattgaacaatggctgcctataaatagaagtttcaagaatccaatagttactccctccatgaggataaatatctcagttggcattctatatatgttggaatccccaagaagtaggctctaatgacaattatgaggaatggacatgctattgatatgaaagcaagcaggtaaaaagtaaaatccctaaatagaaggagtggactagatttcaactaggtcttccatcttcaaaagatctagattaaaggtgtgtcttcccaccacaaatatccagattagaatggcctagtcggccatcactggaaagagaggctcattgaacactcaaactttatatgccccagtacaggggaacgccagggccaaaaagtgggagtgggtgggtaggggagtggcggggggggggaagggtatgggggacttttggggaagcattggaatgtaattgaggaaaatatgtaataaaaaatatttaataataaaaaaaagaagtagatcttcccacttcaagttaaaaaaaaatcctcacacatgtgctccatttggaggtcttagttaattcctgacataatcaggttgacaaccaagaatagccatcacaggtagataagtaattctttctcaaaaattatccaactaattactgcaacattatttctaataatgaaaataaagaaacaatgtaagtttctactccatgataaataaggaaaatacaacaaacacatacaacataatgctattccaccattaaaaccaaaacaaaacaaaaataacaacaacaacaacaaaactcaaatcatataatgtgccacaacaggggaatgaaaatcataaataaaaatataaaataaagccacaaacagaaagacaagtattatatgatctcgctcacttgggtaatattttaaaagttgatctcaggaagggtttagtcatacatgtgtttattaccatcacttgggaggtggaaataagcaaatctgtaggaatcccaggccagctaaggtatataatgagaacatgtctccaaaaggcacacaaaaacagttactttcttacaagttaaagagttaaatggttgccacgagaggcttaggaggaggtatacaaagacacaattaacagaaataagttctatgttctatattcagtagaatggttattgataataataatgtactgtttatggttaaaagctagaaaaaagtattttacatatttttatgatagagaataaatgattgagtatgtaaatgtgcatgtgtgtgtgtgtttgtcctgatttaaaatttacctggtctatacatgtatcacaacaaaatcacagggtccaccatacatatgcagatttttgttcagatgaaaaacataacaaattttctaccagctttattctgtgtcccttctttttaagacagggtttctctgtgtagccctggctgtcctggaactcactttgtagaccaggctggcctcgaactcagagatccgcctgcctctgcctcccgagtgctgggattaaaggatgcaccaccaccgcccagcctgagcccctcctttacctgccagtttctagtctatgttactctacatgtgatccaaagattaaaaaaagaaaaagtaagaaatatcagaattagtgtttagatgaaatctttgagagtcaacccttgaaaatattccttcacttaaaaccacaaattttgttttacgtacatgtgcctgtttaagcatacaatatgagtttgattcggtaaaattgtaggaaaacagcttgcttgctatgactaagaaaataaatactgaatcatatgcttttgtgtatgtgctaaaattcataggcttacccacactaatgtgttaacatggtaagtgtactaacagatgtttctatgagactagcctggcattgattatgaaggccatttctggtgatgtattaatcatacaaattgcttgaacgtattgctaatatctttgtattttgacatttgtcatctaaaagcagaaagactgtaatttcattggtttttcagctaggttgggtatcaaattttatgtcatctcataaattataccaggaggatatagccattccttttcttctcttctctctcttttccctctgtccccctggtcctctttccccctccccatctccatcnnnnnnnnnnnnnnnnnnnnacctgtttctgaactcagtcttattctgtgacaaaccgttgaaaacccacatcctgttacctctatcattttcctagatttggaacacattgcacattcagagcatatcagaaagttaaagccctctgctaacactgcccaacagggatcattttataagtatattaaataagtgtgcatgtttcagttgctcattaaggctggaatttgccaggctgactggagggagagagagcagtgaaggcagcaggtggcagtagcttccactcaaagaacagagattcccagcaggtccggaaacgacgggaggcctcccgctcaggctagctttcctgaaagacagttttccccctctgagagctgctcagttcatttatagaaagatgatatactgcacaaactccacagacgttggacaaaacaaatgggactcgcttgtgtcctcttcattcagacaatgaataacaaacgtgaaggctgagttttcatctcgagaattgcccttagttgctcttccccctccggtgctctccagtgggctccttgtccacctccatacactctcctgagtctcattcaaacgtggcaatagaagtgtgccatgctcgtggatgcttatttgcctttgaacacttaagaaaggatattaatccaatattaataaacagtactgataaaacggactatatattgaatagatactgccttacagttccttgctcagaagatttacacgccttatctcatttaatctgtgcaatagctcagggaattagataagatggttacacccatttcacaaatgcagaaattgaaacagggatcgattaacttggctaacggcatgctttagccaataagtagaagaggccagaggaacagactccaggcctgtactatccattattaccagaggtagagggaaaggtatgtattaggtaggccaatccgtgctgattctgggtgttttaattccactgggatttatgctgcttgagaatgtaaatggacatgatgaagctacacttttaatcccagagctataataaaggctgaggcagggggatcacaagtttaaggccagcctggaactctgtctcaaaaccaaataactgagtaaaatataagttttaaaagcatgtatgatcaaaattcctcttgagaagtctacaacaggtagactcttgaggccaatgcacgaaaagattttgtacgaaacacaccaggaagcaaagcaaatcagaccatgaagcagagactacccagatgttaaacaaaaataattgttttggttttggttttggtttgagacagagtgtgtggccctggctgagctggaactcaacgtgtatgtcaagctagccttgacttcatagagatccacctgcctctgcccagtaggggctaaggttacactatgtctggtgtaaacaatgataattcttaaatgtctctgcaagaaacaaatgaaacagcacagtatatttccccagaaatagacagtacaccgtcagtcagcatcagctcacatgtaccctctgcactccacctctctcaggcggatcgaactggaaaagctgaagaggtgaatggagaggagttataggatactggcaattgtctatctcccgtaggatcttgtgtgatgactccatactaacttttgttgttatattgatcgagcaaatcgatttccccaagtcacgcagtcagtgagtattttatatgtataattaaacacagaatctgtccaagtgttcaacaggcattttagagcagtggggttgggaaactctgatgccctcaggaaaggtatgttgatgaaaaccacttattaattttctctttctcttttcagtaatttatttattttatatgtatgggtattcttgtctataaaaattgttctctctctgtctctctctctctttttctatcttcctgtctctctgtttctgtattcctctctctctctctcttgtgtgtgtgtgtgtgtgtgtgtgtgtgtgtgtgtgtgtgtgtgtgatgtatctggggcctagggagttcataagaggacattcaaccccaggattggaattacaaatggccatgagtcaccttgggcgtactaggcaccatacctgagtcctgtgcaaagaaaacaagtacttttaaacttggagctgtctctccagctcacttattaagttcctattgaaagatactcagtttttatgggtgacaccatttcttattctccagtaagagaatattattattacacttgtttaataatgtatctaaataactgaatttcttctagaccaaagacagacaatgcttgggtgtttgcaaagcccaatgccatccaggctattggggtgatgtcttttggtgagtacctggtttcaaaactctttgtcaatatgacacatctgctctgtgaagaggttctggtccatgtatagagggtcttctacgtttagattccccattaacagtacacaatctagttcctgttgatataaaatcaagctcaagccttgctcgtccattattaaactttctcatttgttactaaattttgcttctaattggagaacagtgtttcgatgctggacattcatgacagtagttagcactcaagcatatccctggccagcccaaagggacccccatgacaatggtagcaatcaggcaccttcctggccatccccaagggactgggcaacaagtcatatcatccctggctgctcaaaggcaaaacaattcccattgttgcccctgtcacatgtcctcctgcgcatgtgtcatggccccaataaaaagccactttttccccaaccccaaaccacttcattttccttccttcctttatgttctatcgcccctctctttaataagccccaccccctccacatgagacctgtttcccagtgtgattttgtcaaacttgtgttagttccaccaatggttagtgtgtctcctaacttggatgtccagtaaatgtcatagacttctataaagtcttggcagaaaggatttaggatttcgctagatatttataactccactatgtcccagctgccaaataaagcaaggtacaaattttcctgaagataggaagaggaaaaaatgggagagttgttggacaggtctggtttatgttgagagttacatgaagttactaggtaagccttctgtgaagttccttgtatgtaggccttacgttctggcttacttagtgctgtaaattaatatatgttcatttgagatattagatattctaaggcagtatacatctctcaccttttcaaagtagaaaacacagtcctgctgtttcccgagtaatgaggttttcttttgtgttccagcgttcatttgccaccataactgcttcctagtctatggttctctcgaagagcccacagtagcgaagtggcgccggattatccacacatccatcttggtttctgtattcatctgtgtgctctttgcaacgtgcgggtacttcacttttactggcttcactcaaggtaacatgagagactaaaccacagcccatcctggtgcaagtgcactggtaccagtcgatccgtgttctgcccgcttctggaaaagtttttccaggggactaccccaccccagccctcttccacccacactctccgctttctcctcctgcctgtctatcgtctgctccacaatttctctcttcttaacctctcagatttagttctgtgatccgtactctctgctcccaggcgcacttgtttgcttgttgccagacgtgaactctggctcccctctgctctgtacttttcctttcccgggtactaatagcctcccaaagttgaagctgataacctttccgcctttggtctctctgaacctttctgagtcagctgtactgaactgcctcccacttgaggaaagaataactgtactgttaccactcttctttttctgtgctaatatttttgttgttgttttcgtcctcagacctttctaatctcccacgccactcagagattggggtcctgcttttccattgacaaatagtctgcgtgatcttcccattgcccttgaagcccaggcctgtaggatgtttctgcttaattgtctcattctggattaaatcagcagacatcacctttcctataaagccagccctttccctccctgccgtcaaagtgacttctcttttcttgtatctcgtggtcccagtaactacgtggtccccgttttactgcttttaacgctttcatccaatcattaagggtttagtactcagggtagcctgacagcagccagatgccatgatccacatatcccgcagcttttgcaggtctaggatctcacttgaccttcccacaaccctttgaatgtaagtggaataactagttctacttcctgcttacacagaaatagaagtaacttgccccagctggcgggtagcaaccagtactcgtgtctactgatgctcaaactcagatattctccccgccccttctctgtctgcctcccaagttttgatctgcacagatcctctagtagtctcttagtgtccagctcttcttggcttagttttctgtgtcactgtggtactcttggtatgccttggtctgaatacctgtcatagatcaccatgattatacacatacatttctcagaaaataagaaagattttttaaaaactgaatgattaatgtgataccaatatagtaatatgtatatatatattatacacacatagataaatgtacatatacacacacatatacacacatatatacatatatatatacacacatatatatatatatacacacacacacacatacgtgtgtgtgttctacctgctctaggatagtacagttaaaagcaaccttgaaagtcttgataagaactgtttcaaacactgccatttaccagtcacgattactacatagtataccaagctgaatggcctaagggttcctgattgcatggtaaccttggtttgtaaatgtctctctgtttttgcaagtgacatcttcatagtgattttagcattggtaattgccatgctgtagtacttataacagctgtatgtggtcactaacacctgtaattccaacacaacacacagggagttaaggctggagatgtgtagcctgtgctataaagtagtgctttatcctataaaaaaaaagtgtgacaggggctctttaagctgagtgtggccacatgtgcatgtatttattcttgggcatgaggaagagacagtaagatcacttgggattcctggctgccagcatagcttcagtgagaaattctatctcaaaaataataaggcagaacatgatttgcagtatacctggtgttctctggcctccacagtccatgcacaaacccacacacatatatgtatatactacatatattcatatacaaacacatacactatttctcacacatatctccatataaaaaaggctgaccaatctttgatgtcatagtttttgcccttgtttttgttttttcttcactataattccctgacacacttatactcaggctgaaatcagccagcattgcttctttagctcattttactttaggtcaatttttgcgtgatcccactgtgagccttgagattgtgttgtttactggaaaaatttgtttctagttgtggtgtggctcagcccttggcacatacctttaatccctctggctggaatacagacatgcccttagtacaccattaaccctagacaatgaagataaagttagtctgtagaaggaagcatccatgtttgaaagtgatgtctaattgagtggcagacataatgataaatcagagaaagatttgacagaatagggtatgctcaattctcaccaggagaggaaaggaaaactaagagagagcagtgtagaaaaggagagaaggcagttttacagggacagttgtacagagacaggttgtagagaaagaataagccagacacaagtgaaaacagaacaagtcggaggatgataatgagccaaaagattagaatatattgacaaagttagtatgaggccaagcagagcaattcaagggcagccaagaggacccagattgagtcagtcagcttggagaggagtttgagctgagttgaatcagccagccagagatcagaaagaattaggatggggtaattatattcagcagcaactctcagaggctgaaaacattccaggcctagataagattgtacagtcttccagaactaggtctaagttagcagactgaggttgtaagccttggagacaattacatctggtgaataaaatatatttttacagtcgatctggtcttgtttgtgtaagctacacacttcattgttatttaggaaaatgtaagcccgtaaggtcgtgggaaatctagagtcctgttgctatgccctaggacttcagagaagatgcaggacctagttattagtggttactgatgggaacctttgttcttgggtttctcacaatgttgactcctcagtcaacactgaagcttggtgtctgccactactgctttgtgctgtcatctttttctgaccagaagggggagcagaagggtaacacacatctggtgtcattggtggaggggaagaacatggccacttaaagcatgtctcaaaaggagggtgtgcaactcctcactctttaataaaaacaagctcctctgaaacagtgtcataaagcgtgtggcttccgtctgattttctaattggtttaattcaaaaaaggcaactgctgtgtgcacatttaaccatgttatgttcaggaaataaagaggcccgaatgctgtgttcagcaagtatgtgctggcatatgatctgagaatagagtcctgcctttcttcatagacttctgaaaacaaacggagtctccataagaactagcataagatatatatagtttatttcttggtttgaaaataaagttaatgtccattcctgaaattgcccccccccccttttcaattttgaaccagtgaaatatgcatttacatttgggtgtatcaaatgttgtgaaagacagtgtatctttggaattccttggtgtggtcctgggtttgtgatcaggacctgcatacctcaagcacaggaaacccggctccccacataccttgcttctcctcttccttgtggggctgtcctcaagctaaagatagcatttcaaagagaattttgtttattttaatagacatttgttaaaaataatacagtcaccagaaacaaagaccagaagccatttataaaggcttacacataagaatttagggagttgattctattattaaaagaaagagaaaaaaaaacccaaaacaatggactaagtagtttttcaaaagttggcacaactttaaggcaagtatactgaaaacaaataagaactctatcagtgacaagtttactttcaaataaaatatacactagttttaatagcagtgaataaacctggggctactaaagtatgttatacttagacctggtaatctatgtgtctttaatgatatgaaatatatatatatatgtgtatatatatatacacatatatatgtgtctgtgtaggtgtatagatagatagatagatagatagatagatagatagatagatagatagaggctatcacttttatacaaaggaaaatctcatttgttagttatccccaatacattgcaaataaatctattttctcttgttctccaggagacttgtttgaaaattactgcagaagtgatgacctggtgacctttgggaggttttgttatggtatcactgtcattttgacttacccgattgaatgctttgtgaccagagaggtaagcatgggttctactacatttaggaagacatagataattcaatatacaaattctcaaacacatgatgacaggggatagattcatacagccttctctttaggctattaagtatcagaatctacagatgaacatcgttaagtttcaaagaaacctgggacaaatggccaaatgaggtgtctattaacatatcaaagcagacacaggctgccagactatcttagtatttttcacagaatccggctattttgtgcacttctcccctccacacttctcacccgaactccctaccctaaacctttctagaccagagcttcactcccccaccacttcacatcacccccatcactcatgattcttatacaatccagtcatttcagtcacattatctcttgatctcttgcccttggctcctctcttggtctgccctctctcctcttctctctctctcctcttcctctcttgctttctcacctctgtctctcctctcatagccctgtccagtctattagtcatgtttaatgtgcttctttctctccctgctcgggattcttgaagatgctttgggctgtttttcctccctcatatctacgtaaaaatgttctcctcaaccatgcccaggagtggtcatgacctcattatcattcaaatatatattataatatttacagaataaaaggtttcacatgttgtaactataaattatgctccagggtggagtctatgttatcataaacacacatattccacttctttcccaagtgagtagcagcctttaggacagccaaatcaaaatcactgctttttatttttaaaagaatgtcaaaaaataacttaaggatgaaagttcaaagacattgtttccaaaattataatttgccaagatgttaattaagtcattgtttatttaccataggccagaaaaattggttttattttatatttaatatataataacatgtatttatacaatatagtatcgtatattatgtataagtgtatattatataatataaatatatatttatatatttaaaatattatggtctatgaggaaccaaatttcaacttaaaactgtaagtttacagatctattttgatatctatagttatataactgttttatatgaattttacatagttgtgtaaatggacgagaatctattcttgtgtaagactgggtgatatggcttgtcaggaatctcttatgctgttggctagatatccagtgtgctgagtagtagcacccaccatcccggctcacagagcttctttcagagtcactgtgaaaagggcttagtcaggatctattcctacaggctgtttacacagctctctgggtgaatgtctgtaatgtatgaagcgaaccaccaacagagtcttaaattccctatctaatccgcaaggctgctgatttctcactgcaggtcaggtctggcaatgagaggcagtgctgggacatggcaggggatgttcagtactgtgcattcttttcagtcacacccaggttcacagatggcacaacccagtccattatcatcaaggcaggaacatgtcattatccaggcaggcatggtgcaggaggagttgagagttctatctcttaatctgaaggctgctagcagaatactggcttccaggcagctaggatgaggttcttaaagctcacacccacaatgacacacctactccaacagggccacataatgacacaccttctaatagtgccacatccctggtctgagcatatacaaaccatcataaatggcttctggactagggtatgtggatggtttgagtctcttcacctgcagctctttccatctttcttatggggaaaggagtttctattctagctgccatgacaggaaagcagaatacaactaagatctttgccttggtagtatacactatgcagggtgctgtatgaatcctactagttgatggtgctgtctgtacacatacacacacaaaacctacataagcacaactatttctcttcataggtaaaatggccaggcacacctaaagaggatagaaacctgatatatatcctttgctatcatgcctaagtggttatttcagcctcagaatctcattttagagatatatgggagagttgtgattaaagaagatgaatttggggaaacatcaaactcatatcatctacagttattagtatcaccattaggtctctaccagcagcgctggagcagctgatctgtggggacatcatctctctggatgattcaacgcatgtcatcttcatggtatccagcacctgaccctctcttcccaaatgacagttcttgtttctctgggattttgcacatactcagttcagattctcctttctgtcctccatagataacatcctcattttttttctcctttacttttctgtagactgtggtctcagtgtgtagttctactctaaattttatccctacctcaagctccgacaggtcactcacatttcagcaatggcataaaaaggagtactttaaaggaagctgacacgtttgtgtgccctggttctaaaaacctgcctggagtgacataggaatgaaaaaacacagacacacatgcagaaaagctggagttgggtgggatgtgcttgctctgatggaatgcacttactttggcaagcctagaagcgaaagagcttatatatacagggtaaggagaaggtgttagcttgtcctggaggaggtctcagtttgtcaacatctgggaggaggaacctgagacagagtacactttctgtcaaaaattgcacaaggaccctggaaagggtcggccaatcacgttggtctgagacattggggtccttgacatagctgttctcatgtcaatattacacattcactgctcccaacacgttcatcagaaatttctctactccccacactggaccattctaaacaactggagagctttctaaactttatttagtctttttcattctgccactaactgttctctgtttgtttctttataaaagttatgggtcttctttggggatgtcaattcttgagactaggattcatcccttagacatcttcttattgtaaatttatcagaacgggatacatccaatagatgactagagattagcctcctggtatgcgtgctcatagaaaataatgatgaactcattttagtttgcctttcctctttgtgggttttatgtgcctagcatttatttcctattaataaaggacagtactcatcaagtatcatgaaaagggtaaatcccaacaccgtccttagaggccattaaataatcaattatatttgtagtttgttttagtggtaaccctaccagctcaagaaggataaggcaacaacctaagagatttcttaccctaaaaaaatataacactggtgtgccatgctctgggtctacagcatacgacatcaactgacaaggaacctagtaaacaatacttattattgctgtgtatgtgaatatggaaacacttttgggaagataatcatgttcctagtgacctaaggtttgacaaatggcctcagtggtagtgtttgatacagtcatagtgttactgggattccagtaagcctcaagggcatgtctcattctgatctgcttctttgccaggtaattgccaatgtgttttttggtgggactctttcatcagtgttccacaccgtcttagcagtgcttatcgttactgcagccacactggtatcattgatgattgagtgccttggaatacttttagaactcaatgtaagtacattgaatgttttgctccctcctttcttaaaattttctttcttaaagtacaaaaggtgctttccttttttttttttaaaagtatcacttcctgaagtataatgaaaatctgttcacaacataataatacatattgctaatgatgatactctgctgtttatggacacatatagtttgtgccagagcttccatgaatacaagtcttgtccctgtactataaaggtatttctcaagttgacttaattcttcactggatgtggaatttaaatatcttgtggacttgttggagttatagaaggaagaaaattttatcccaatcacataattgctttagatgacccaaatttttttctttaaatactttttgtctcctcagacttttgtcatctctaataccacccagatgtaggtctctattgtaccctgtctgaattgatccatttctttcaaagcaattgtaaatgctattgtcctataacctagcccttgcctttatggaaacttgtttccaatgtgcttctccaaaggctccctttgctgttagatttatttttagcctgtaactatgccgtatcgatctttcctcttgtcctttgccttatctgtttttccatttgttccttctcctgctctcctgcaataattatttttctatgtctgtctaagtcttacaaagactattgccaagtgcaacttgtaactcattaattcattgaccatatagtaattgagcaatgctctgtattacacagtagttatacagtgacagaaggaaataagaaaaatcaaacctttctcaccaacatgaaggtttagctgctttgtagatgatgaagaacacacacagttaacacactttggtgacagattccattgggaacatagagggacagagaagcacatcaagaataattccattctatttagtccagctaggataatggtgtcctttggtgagatagcgatgaatgaaagccaccatggtaaggccattattcttctcttacactagccttacagaatttctaatcagaaggaatccagttggcatttcctggtcatgtgccacaggaaggacagagttatacaggagagactccaactaactcattatacaccctcagctatgagaattgagcatatctgaaggcttatctttcccaataccatcccaaagccaatgtgactacaaattccagaagaaaggaggaacatagtctgttgaggagtaaataatttggacttttcttatatcagataacgtggaaagggagactctccatctcccccaagccccagacactggggaccctagggtccattacaccaacaacaggaaaaagccttcctttggtatgttgttgcaactctgtattcccagctagttagcttctcagaagactaagaggaccacttgaacccagtctgcgcagtgtggtaagacctcatttctaaaacatattgcagaagtaaaatcatataggaatcttaattcctgtaaatggtttccatataaccttatgaaataacttttatatatgatctttgaacacataatatttgtactgtccatgaattatctttacttaccaactgtaagctctttgaagacaagcatattttatgacattcatcatagtccaccacactgggtactgtgttgagaacattgggctctaatcattatataagtgattatgtcttatgatcacagtttaggactcagttatataaatattcatagatacaagagcatctactagactagaagcaggaaattaaggaaaatatgtatatctatcatataccacatatacatatgcatatatatatgtatattacagtattgtaggtagcattaacatttcaactgtagtgtagagatgtccaaattaatgagttcttatagagttatttttctgctgctatgataaaatactttgacaaagcaactttgtcattttggctcacagtttatcatgactggaagccacagcaacaggatgccagaatgaggccagcctagcattcaggaagcagactgatcacatttcatcctcttatataggaaagagagagtgagggaggggagaagggagggagacaggaagggagggagacaagaagggagggagggagggagggagggaaggaagaagagagacagagaagaggaaatgggtccaaggctataaaaccctaaagcctgcccccaatgatttcctccagcaaggacacatcctgtaaaggactttcttaaacagcagcactaactggggaccaagtgttcaaataaatacatgggcctagttcttattcaagccacaataccaccatcctggttcttgttctgctttggtcttcctgggtttatgacttatccgatttgagttccaaatgtttattttttttacttaaaaaaaaagttttcaagctatctactcattatgcatgcatggtatgtgtgtgtgtgtgtgtgtgtgtgtgtgtgtgtgtgtgtttgtgtgtgtgtgtgtgtgtgtgtgtgtgtgtgtgtgtgtaagagagagcgactaagagacagtgagcaagaagagagcagacaggcacatgtctgccactgtatacatacataagagtcagtggaagttggttatctcctgccaccttgatcttggggactgaactccagctgtcagatttgtacccactgaaccacattgtcaggagatcatacttgtttttaaatttttatttatgttatgtgtataaatggtttactgcatttatgtaagtggatgtatatctggcctcagaggcaagatggagtagggggcaccaaatcttagagaaatttagagaaagagactgctgtaagctaccatgtgtgtggttagaattgaacttgggccctccacaaaagtagcaagtattcttaacaccacaccatctccctgaccccagtaggtaggcattctgtctgaaacatcaattttcaggttcaattgagattccctgtctcagaggaataaggtagagattgatataataggaaacccaaagtctcctgacttccatatgtgtgaacatgtcgacatgcgtatgaatacataactttcattgcacatacaaaatctgggactatagctcagggattcagtgcttctctaacttattcaggggtctgggtcctatacacagcccagaaagaaataatgggtagggaaagtaagagagggagagattaaatttatctttattacgcttaagaataatccatgctgcacatgaaatgattttaaatggactaaaataaataccagactgtaagtaaattggaagtaaagatttctttgttcattttttttgttcatagttttcatatgaattaatagaatttctgtgaatggatatgcgtgagcagagccctgttagggcactaactgtagtgttttagaaacacttctctgttgtggctttttagatatcacaatcacccacagagatgcggtaagggttaggatcatgcataattagaaaaatctgttgttggaaaaactgaataaatataagctaacttttttgtgtttcctggtaaattccaaagcccatttggaatgtcacctttgttgcactgttttcattgcagagaacagcaatgaaatattctcaaggcggagacagtctcagttttaaagaatccattttagagggaaagaaaaagtccttgacctgttctgttgcaagactccattcagcatcttggctagatgttgctggtagcgaaaagaatgtatttgcagtaattgggccctatgggtttctacttgcagtacaaagaaggggcgggggaagactga

SEQ ID NO: 42 - DNA, 1238 bp, Mus Musculus
ggctccttccatctcgctggcgaacttaagcgggcaaaacctgcaggggagtttggcctggtgggagcctgcttcccagcctcagaacctgcccttgcgcagatgcagacatgagctatcagcagccacagctgagcggtcctctgcagagagagacagactcgagtgacagagaaagcctgatctccggacatgaacacggagggaaatctagtcagtctgccgctgttttcaatgtagtcaattctgttataggatctgggataataggattgccttattcaatgaagcaagctggatttcccttgggaatactgcttttattcttggtctcatacatcacagacttctccctagttttattgataaaaggaggagccctctctggaacagactcctaccagtctttggttaacaagacctttggctttcccgggtacctgctgctctctaccctacagtttatgtaccctttcatagctatgataagttacaacataataactggagatactttgagcaaagtttttcaaagactcccaggagttgaccctggaggttggtttattagtcggcacttcattattgtggtttcaacggttacatgtactctgccattgtcactgtaccgagatatagcaaagcttggaaagatctctttcatctctacaattttaacaactgtaattcttggaatcgtaatgacaagggccatttccttgggaccaaacataccaaagacagacaatgcttgggtgtttgcaaagcccaatgccatccaggctattggggtgatgtcttttgcgttcatttgccaccataactgcttcctagtctatggttctctcgaagagcccacagtagcgaagtggcgccggattatccacacatccatcttggtttctgtattcatctgtgtgctctttgcaacgtgcgggtacttcacttttactggcttcactcaaggagacttgtttgaaaattactgcagaagtgatgacctggtgacctttgggaggttttgttatggtatcactgtcattttgacttacccgattgaatgctttgtgaccagagaggtaattgccaatgtgttttttggtgggactctttcatcagtgttccacaccgtcttagcagtgcttatcgttactgcagccacactggtatcattgatgattgagtgccttggaatacttttagaactcaattacaaagaaggggcgggggaagactga

SEQ ID NO: 43 - protein, 375 aa, Mus Musculus
MSYQQPQLSGPLQRETDSSDRESLISGHEHGGKSSQSAAVFNVVNSVIGSGIIGLPYSMKQAGFPLGILLLFLVSYITDFSLVLLIKGGALSGTDSYQSLVNKTFGFPGYLLLSTLQFMYPFIAMISYNIITGDTLSKVFQRLPGVDPGGWFISRHFIIVVSTVTCTLPLSLYRDIAKLGKISFISTILTTVILGIVMTRAISLGPNIPKTDNAWVFAKPNAIQAIGVMSFAFICHHNCFLVYGSLEEPTVAKWRRIIHTSILVSVFICVLFATCGYFTFTGFTQGDLFENYCRSDDLVTFGRFCYGITVILTYPIECFVTREVIANVFFGGTLSSVFHTVLAVLIVTAATLVSLMIECLGILLELNYKEGAGED

SEQ ID NO: 44 - DNA, 14072 bp, Homo Sapiens
gctgaagaatttagggagttgattctgatgtaagaagacaatggataaagtatttttcagaagtcagtacaaattggcagcaaatctaccaaaaacaaataataagagaaaaactatcagtgatggatttatcttcacatgtagcatgtactggtttaaatcagtgaataactacatagttattgaattcaaaaacttttatttagacctggtcatctattctcttaattaaatgaaatgaagtttatggagattcacttataagtcatgtgttgcttaatgacagggaaacattctgagaaatgcattgttaggtgatttcctcattgtgcaaacatcacagagtatacgtacacaaatctagatggtagcacctattacacacctaggctatatgctatagcttattgctcctaggctataaacctctacagcatgtttctgtactgaattctgtaggcaactgtagcagaatggaaagtatttatgtatctaaacatagaaaaatatatagtaaaaatacagcattgtaatcatatatgtgggccattaggtgatgcataactgtaatatctaatatttaatttattagatagttatctcaaacatttagtatctagtaaataaacttattttatattactatctaggggacttatttgaaaattactgcagaaatgatgacctggtaacatttggaagattttgttatggtgtcactgtcattttgacataccctatggaatgctttgtgacaagagaggtaagcgcggttccttcccaacgctttacccaggtgatctctctgccacatttaatttaggaagatttataaataatacagtttggcaaattcccaagggcatgacaaatggtataatttgtaaaattttcttttttgactctaaaatgtcagagtttaaagatgaatttatattcagatgtttacaagacaatttttcaaaagttcggtttgaaaattaggtttggtagatttggcttatatttctgtgagcacaaatatttatacaactgcattccaaagtgactgccagccttttgcgacagccaaactaaagttgttgcttttaaggcattcttacaaagaaattaagtatcaaggtttaaaacatgttttacaaaactgtctttttgcttagatgttttatcagtcaacatgtattaaaggcactgtagaatctacagattctaactggttttgttattttttaaaaactaaaatatcttatattccatggagaaccaaaattcaactgaaacttttagttttacagatacattttatttatgtatttatacatgtagacgtgtatatttacaactatacataacataaactaataatataaataataacaaatatataggatattatttacatataaatatattgtattgtcaaagtcagctctaaattgggttatatattccacttgtatttgtagagaaatattatctgaaagagaattcattcttttggtgtaaaattggataacatggcctgtcaggaatcccttatgctgtcagctaaaaatccactgtaccagtcggcagtaaaacatgatcttgcttcacagtgggtctttcagggaccacactgaaaagggctcagtcataggatctgttcctagaggctgtttatacagtgcaccatgtgaaagggtctaatgagataagtgaaatatctacagagctttaaatacactaaataatcagcaggcttcttgaggcaagccagggcttactttaagtcagtcccagggataaggaactgactgcacggggaaacagaagagggaaatgtttagcactgtgtatgtcctttacaactagcacttctctccctcacacatgtataactcacaggccagttctctaccttgactataaaggagaaatagactgaactaatttttttttaaatttaagagcctttcgaaactttactagctattgtcagatgcaggacatggtattattttagcttctgctcagtacgtaggttcaaatctaatctctagatcagcaagtaagaacagatggtgcattctcacgtggttgctagtaaactgcctgcctgcagacgatctgagtcacttcacctgcacaacttctgtgtttagtacttgaaacttgagtttcctttctagctgctgtggcaggaagatagaactgaatcaagatctctgccacaatagcaaatactcagcagaagaatggtgtctataactttcccttctcttactcttcattctgcacacacacacaggtacacacacaaatgtatgactgacaaaaatataatcaaactgtttcaattcataaaagcactaaaaaggctgtctacccttaacaaatatctcttactacctgcctcactaagtgatttttcactctcacaattatatcatagaggcatctgtaagaatggatcttaaataagataatacttggagagacattacaacttatgttattaatatcaccattaaattattagcaaagtcatggcagtatgtgacacatgggagatgttgcatatccaggcagcacagcttagagagatggcttctttatgatacctcaatatctgaccttctgttatttccaactctttgtctcactgttcttttgcacagggtcactacttattcagactatcttctctttatcctccataggtattgttcctgttattacctctttgctctttttcacgctcttgtctcagcctataattctgctccaaatcctgtgcatgtttcaagccctacctcaaaccaaggtaggtcaagcatatttcagggatgctgtaaaggagattactgtaaggagacggctctagatacctaaagctccttctagtcctaaattctccttgatcttttttgtcctgttataaattgatctctacttgcttttttaagtttcgttgtatgcctccaaaaattaattcctgagaataggaatcatttccctgacattttatctttgcaaaccatatcataatatgggacacattaagtcagtaattttttattgctttcctgatctgagtagtcatgaaaaatggtgatgaactcttgcccatttttgttgaggaaaggcaagataaaatagacttaaattataacaaataggaattagttaatgcagaattaatttcctgttagtaaaggatattacacatccagtattaataagggaaatgtgacagctacttcttagaggccatgcaaataatctaaatagcatgtttagtttgttttagtagtaacctattggactcaagaaagaaggataagataactttccaaagtctctcctgtacttgaaagatacatgtattgaaacatcggtatgccacactataggtctgtaatataatccactgactaatagttcaacaaagaatacttgttattgatatgtgtgtctgtatgtaagtaatttggaaaatatagaacattcctagtgacttaagatttgattaatagccttgttggtagtattttatatattcctaaatactattgtaaaatactccctcaataaatcctgcatgcctttaaaagtccctctcaaaataatctgtttattcggcaggtaattgccaatgtgttttttggtgggaatctttcatcggttttccacattgttgtaacagtgatggtcatcactgtagccacgcttgtgtcattgctgattgattgcctcgggatagttctagaactcaatgtgagtacgtgcaaagatttaccccttcactctaaaattctctttaaaagataatgattacatttaacataagatgtattttccttaacaaaagtgtcacttttgaagtggaatcaaaatatgtttgtaatagtaaatattttcaatgatgattctgtgcactttgtgggactatatagttttaaagtagtggttgtttagagacatatggggtcgtcacaactgggtaggcagtgctgttggcctctagtggatagaggccagggatatacatcccacaatgtgcaggtctctcacagcaaaaaattatctgatccaaaatgtcaattgtgctgaggttgagaaaccctggtttagagtacttttgcatatctcatttactataacacataaatgttactaaaaatagctataaattaagtggatttggactttgctgaataataatatatctagtgaaatttatgagaaatatgaaaggattcaagttatatccattcacttgctatgacaaaatttctttttctttaaatatttttctttctccagatctttcttttatagtctgcactgccatcaaccaaatagaagtcctcataatatcacagttgaattaatcccagctctgtttcaactatcatgtatttaagttctgctttcagtttatcggcattttcctaccagagcaagtataaattccgttgcttctaccatcttgtcttctgtgtaaaactatttcccatttacttcccaaaatttatgttcagctctagtcaatctaattttttggcctgtgaataagccatatcaattctttccattattctttgtcctatctgctttttatttccgataatgattatttttctttcatttctgtccaaattttacaaaaactttaagatccagtgcaacttctaattcctttattcacattcactgatcatatatttattgagtaattactatgtgccacacaatagaatataaggatgaatgcaataagaaaggacctgtgcattctcacaaataaacataaaagttcaactgcaatataggtgatgaagacagaggaggccaggaacggtggctcacactgtaatctcagcatttttggaggccaaagtggatggattgcttgagcccaggagttggagaccagcctgggcaacacagtgaaaccccgtctctacaaaaaattagccgggtttggtggcatgtgcctgtagtcccagctacttgagaggctgaggtgagaggattgcttgagcccaggaggtagaggtttcagtgagctgagatggcaccactgcactccagcctgggcaacagagtgagacccggtctcaaaaaaaaaaaaaaaaaaaaagagaaaagaagacagagggaaatggatggattcccaaaacacatttttcagaaaagattggcataatttggtgacacagattccattgggaagacagggggcagaatgacttcttggttgtattttgtggaactagaataatgatgtcatttgctaagacaggaatggaagttgttctaccactacaaagtggctaatcttctacaatccttacagaatttctcatcagaatcacccaccagttagcacttattggtcatgcaccacagggagggcaaacccatacagatgggatcccaagtcatcatttactcgtttcattgagaattgaggcataggtgaaggtattattgtcagtgcccaagttactatgtcatccagaggccattttgatttgaaattccatacaaaggcaggagggaattcagtcagggaccctactggggactttcttgtaaatggaaagtggggagtaagcagtttccaaaacctcaggagactggtaattgtctattctaccaacagtggaaggaaagctcataggaaagtaagcaagtgtcaaaggtaacttttaccttcttcccagttttgcataggccaaacactagtagggccactaaaaatcatttcgcataccaatcttgatttgtgtagatggatcactactacattaatgcgctgacttaatttatgtattatctcgtgtcatgtattgttgaagctgtccataagcttgccttacctaacaattggtaagctctttgaagacaaaaatacttaaccacctcctccctcctccatagtatttggcacagggctaaggacacagtgctgaaattattgcatgggtgattgcaccttgggactacagttcaggatctatttctataaatattcttagacacaagatgctttctttaatgtagtaccaggaaatgaaatgttataaaaaatggttgctgttgacagtagtagtaatctttcacctatgctgtggagataatcaacataatgatttccaagccctgttttttcctgttttatgaaatatcttgtttgagtccacaaatttgtttgttgatattttaggattttgttgtaagacaaaatatatttattatctgcctgaacattcactacatagtgatagcccaacaaatttttttttgttttcaagttaatcaagtgcacacatattgctcatttttcaggaatgagttttttttgtaaatctagccattactttctgtaaagttaattgctaatctccatggcatttgcacaacaaaattgtaggcatataatcatattaaatattctctattatacttatattgaaaactgttttggttaatacagaattctggtattaaagaataatcatagaagaatacattgtgaatatctattttaaagtcaagatctgagctggccctggaggactatttttaaaatttaaaatatgattcaagatctttagatttttttaaaacctgattatatagacatacattaaaaattagagtgctaaattgtctgttatgacctaatagcccaagacaattatgctagttttaaagcactttgtaagaattaataaaatctaggatctccattctcagaccacctgagaataagtgtttttcacatcagtacgtcttttggtgtgcgtaagaacgtattcaaatctttactcaactcctttttgtgtggacacttaccatgtctaatagagccaaatcaagcatcatgtctgttagtaactaatacatgctggatcatgcaacactttggaagtaacttaaagcatgctgtgttctacttcataataataatgtgggcagggcgcagtggctgatgcctgtaatcccagcactttgagaagccaaagcaggcggatcacctgaggtcaggagttcaagacctgcttggccaacatggtgaaatcctgtctctactaaaaaataccaaaaaaaagagaaaatattagctgggtgtggtggcatatgcctgtagtcccaaccactcgggaggctgagacaggagaattgcttgaacccaggaggcggaagttgcagtgagccaagattgcgccagtgcactctagcctgggtgacaaagcaagactccatctcaaaaaataaaaaaaaagaataataataataataatgtgagctaccatgtattgagtacttactctgtaccaggtgctttgcagtatcatctccttttatctatattaaattgacagatgaagaaactgaggcactgcatgattaaatactctgaggtcatactagttacaagtaaaaaaatacagatttgaacacaggcatttggaccctaaagctcacattttaaatcattacactactctgagatttcctaagcataagattttaaattatgtaaaataattatgctcatttctctatccactttcttaggttataaaatctatgcattgagtttatctgtaagaaaggttaagagtaatctatgatacatatggatagactttaataatgggttaaaacataccaggagatgaaataaaatggaactgaaaagtttttgtcttaataatttttagttaataactttcatcttagtaattgtagtactttagaaatgtagttaatagcttttatcttagataacaattttagtactttaggaattcttttttattttagcttctgaataagtagaataatgagcttcacagatgagatgaatcagatcatgcaaggttagggaaatgctactatttagtatcaccaaataatatagaataaaatgaattgaggtaatagttattgaattaaaaaatagaaccttgctttcctttttttttcttgttttcatgtcagtagacaacaatgaaatatttttccaaagcaaacacacactaagttttaaaggtttcattttagaagcaaatcaaataaatataagcactattcttggtaacaagaatccagcgtcttagcactaatgttgctattggagaaaagaggcatctgcagtaattgggccctatgggtttctactcgcagcagtacaaagagagaaaatgaagcagctggtgcctgtgccagcataaccagctcaacaagcattgtgtgtggtttacagtggaaggaagaaagcaagccaaatgccagcaagagcccagataaagaaatacagtctttggggtgagcaagccataatcccagttgccaaagacttcctgagcaagagagagtttctttttgaagtattggagtgaatttcatgagtttagattaattacaaagtagaaatttaaaagatgtataagcattattttatttagtttccagcttccttgcatcatttgagaaatttctattcaggtaggaaaattcaggcactttttcaatctgtactggcaataaaaatgttcaatagcttctgtcctttctctccagcaaactgcaaaatactctgacatccacagtgttattatcaattaataagaactgtcccatctttataacttagactatattttgttgtctttttaataagcagttatgattttacatcctgtcaagcaatttcaaaaattattccaaagccagtggtgtatccttaagcaagtctacattaaatagatcaaatcagctcgactaattcatagggaatagatcagatgcaaccacactattattttactgatgatcttgacttctagcaacaacctttagtaagactgagcttttaaatatcaagaaagtagctggtatctaaacaagatactcaactggaatccttccagtagaaatatgagctatatagtctttcctctaattgctactttctcaacacttaagaattataacataaatagaacacccattgctttgcactgcccagcaagttaagtttggaagagtaccaaaaggctgactgatgacagcttcttagcagaagctgggggcagttttcatcctgatagtacttccacaatctgcagttccagatgaattagccacatgtttgtgactacaaagagaagactacaacacacacagacacatacacagacacacacacacacatttgtatttgaattactgtttgttgttttcacaaattgttattttaaagaaatcagaggctaatagtttttgttataaatacagaccaattgttaacagtatcttccataacttaaaaagcactgttaattccaaatattatgatagaatctatggaatccataatatatttcattctagtcatatgacaactaatcttttattttttgtgtacctttgtagatattaatttgtattcaggtgctatgaatggcaaaagtatattttccatatattctaaattagaacatgattttggtatttttaagtattttctcattcttatgtttcttactttggaaatattttccatgcagtgtggtccctactattctttctctggacacttttgtttttgtaaaaattcaaaaagttacataattgggatcatagtcataatatttctggtatggagagattgctttgtataaaacacacagtaattttattaactggtgtgagaatatatttattttaaagctattttaaaggtacaatttataattttacatcatccaacttcaaatttattttgctgttattttcccaggagaaaatttaccaaaataatgtgtcaaaaagcttttaaaccataggtgatagttgcataggatttcattatactattctttctacttttgtgtatgcttgcaaattaacttttaaatttagaaaaacatagtttatgaaaagcttgcatttagttgtaaagtaatattacatttgttactgattttatatattaaaaacttacattttattatttcagagaacaacatttgtgaaatgtcataataagagaatgaaaactaaaaccacatgaacagctgggtgcggtggctcacacctgtaatctcagcactttgggaggctaaggcgagaggatcacttgagctcaggagtttgagaccagctggggcaacatagtgatccctcgtctctgcaaaaaattacccagacatggtagcatgtgcctgtagtctcaacaactcaggatgctgaggtgggaggatcacttgagcttgggagatcaaagctgaactgtgataatgctagtgcactctagcctaggaaacagagtgagaccctgtctccaaaaaaaaaaaaaaaaagagagagaaaacaaaaaacacatgattatctcaactgatgcagaaaaagaatttgacaaagtttagcatcatttcttgatagaaactcttttaacagtttagagagagaaaagtcctcaacataataaaggctatttatgaaaaacctacagctaacatcacaattaataggaaacaactgaaggcttttctcctaagatccaataaaaggtaaggatacccactctcgccacttctcttcaacatagtactggaagtactagcaagagcaatcagacaacaaaaagaaataaaaggcatccaaattggaaaagaagaagtaaagttatttctatttgccgatgacatgattctatatgtggaaaatcccaaagcttccaaaaatagtgttagaactaataaattaattcagtaaagttgcaggatataaaaccaacatacaaaaatcagtagcatttttatacacaaataataacctagctgaaaaagaaatcaagaaaacaatatcatttatgatagcatcaaaaaatactctggaataaatttaaccaaagaggtgaaaaatttgtatactgaaaactataaaatcttgctgaaggaaattgaaaaagacacaaataaatggaacatataaataaatggaaagatatcctgtggatggaattaatattgttaaaatggccatactacccaaagcaatatacaaattcaacataattcctatcaaaattctaacggcattcttcacagaaatagaaaaaacaatcagtattgaaaagaaaaataaagttgaaggcatcacactttctgatttcaaatgatattacaaagctgcagtaatcaaaacggtatgatactggcataaaaacacaaatatagaccgatggaacataaaagagagccaagaaataaatccaaacatatagggtcaactaattttctacaagatcaccaagaggacacaatggggaaaggatagtcttcaataatgatgctgggaaaaatggattctcaaatgcaaaagagtgaaattggaccctgatcttacaccatacacaaaaatcaattccaaatggataagatacctaaatgtaaggcccaaaactgtaaaattcctagaagagaacatagaataaaagctccttgacattagccttggaaatgatttttttgaatatcacactaaaagctcagactataaaactaaaaataaataaataggactacatcaaactaaaaggcctctgcagtggggagggggtgcagggcgggaagaaaagacaacgtacagattgggaaaaaatatttgcaaaccatctaactgataaagggtcactacaaaaagtttacaaataattctaataactcaatagcagaaaaatgattaacttgattaaaaaatgggcaaaggaccttagcagatatttctccaaagaagacatgaaaatggccaacaggtatacgaaaaagtgctcaacatcattaatcatcaggaaaatgcaaattaaaaccactaggcgatatcacttcataccctttaggatggctatgatcaaaaagaccagaaataacaaatgttgacagaagtgtggagaaaagggaaccctagtacattgctggtgggaatgtacattggaatagtcaatatgggaaacagaatggaggttcctaaagaaattaaaaatagaaccattatatgacccaggaatctctattctgggtatatactcaaaaaagatgaaatcaccacctcataaagatatctgcactcccatgttcattgaagcattattcacaatagtgaagagatagaaacaacctcagtgttcattgatgtatgaatggatacagagaatgtcatatagatctgtctgtaacatggaatattattcagccttgaaaaaggagatcctgccattagccacaacatggatagacctgaagaacgttaagtgaaataagccagacacataaagcaaaatattacatgatctctcttatatatggaatatttttttaaatgcctaatatatagagttagagataagagaataaaactgtgattaccaggggcaggaaacaaagggaggaaatgtagagaggtaggtcaaagaattcaaagtagcagatatgtaggatgaacaagtctacagatttaatgtacaatatgagggctgtaatttataaattgtattatatttgggacttttgttaaataagtagatattagttgctctcatcaccaaagaagtaattatgtgagatgaatagatatgttagttcaatacaataaccattttactatctgtatgtattctatgacatcaggttataaacctcaaatatacacaataaaatttattttttaaaaacgtatgttttatggtttaagagaatatttgtcataaaattttaatgtatgttacattgttaaatatactataattaaaatctaacgtaattagaaaaacatattacctaaaatgcattaaatgttaacatttatattatttgctaagtttctattgcgaattagtcctattcaaggggaaagtctcttcctttgacatcaatagctgttggtatttttataatagacaattctaccaccattattttaaatctgacattcctccttaggttgggtttattcctagctaatgtggggaagggtgaatgagtaatagtcatttagctctgctgtcaactttctcagtaattaatgtgcttacttttatttgaaagaggatttagaaatgctatttcatgttaactgccttagggttatagtttttctttctcacacagataggcacatcttccatacaagctcaggtaaagaagacagacattgtggcccctatacaatttcccaaaatttccttcttatacacaaatgacaaatagaccattcatgtttgaagggcatagtggatacacaatagttttagtgaagaatataaggaaatatgatgaactgaaaatacaggaaatttcaagagtgccagaagtcagtcctattatctgctttattttctatattattttgtgataatattttcttaagtctgaaaagctgttatactatttcattattttcatttgtaaatatgccagtggaaaaggtaatgcctatttctaagtctttcttagaactatttttcctccctttgtttgattcaactgaacctatcacatgtttaacatgtgcatgaaaaacacattttgtaaatgcttttaaaagctgtccgaagaatgtttccatctagtgacattatcttgtttcttgttttcaacatgcagggtgtgctctgtgcaactcccctcatttttatcattccatcagcctgttatctgaaactgtctgaagaaccaaggacacactccgataagattatgtcttgtgtcatgcttcccattggtgctgtggtgatggtttttggattcgtcatggctattacaaatactcaagactgcacccatgggcaggaaatgttctactgctttcctgacaatttctctctcacaaatacctcagagtctcatgttcagcagacaacacaactttctactttaaatattagtatctttcaatgagttgactgctttaaaaatatgtatgttttcatagactttaaaacacataacatttacgcttgctttagtctgtatttatgttatataaaattattattttggctttta

SEQ ID NO: 45 - DNA, 1297 bp, Homo Sapiens
gctgaagaatttagggagttgattctgatgtaagaagacaatggataaagtatttttcagaagtcagtacaaattggcagcaaatctaccaaaaacaaataataagagaaaaactatcagtgatggatttatcttcacatgtagcatgtactggtttaaatcagtgaataactacatagttattgaattcaaaaacttttatttagacctggtcatctattctcttaattaaatgaaatgaagtttatggagattcacttataagtcatgtgttgcttaatgacagggaaacattctgagaaatgcattgttaggtgatttcctcattgtgcaaacatcacagagtatacgtacacaaatctagatggtagcacctattacacacctaggctatatgctatagcttattgctcctaggctataaacctctacagcatgtttctgtactgaattctgtaggcaactgtagcagaatggaaagtatttatgtatctaaacatagaaaaatatatagtaaaaatacagcattgtaatcatatatgtgggccattaggtgatgcataactgtaatatctaatatttaatttattagatagttatctcaaacatttagtatctagtaaataaacttattttatattactatctaggggacttatttgaaaattactgcagaaatgatgacctggtaacatttggaagattttgttatggtgtcactgtcattttgacataccctatggaatgctttgtgacaagagaggtaattgccaatgtgttttttggtgggaatctttcatcggttttccacattgttgtaacagtgatggtcatcactgtagccacgcttgtgtcattgctgattgattgcctcgggatagttctagaactcaatggtgtgctctgtgcaactcccctcatttttatcattccatcagcctgttatctgaaactgtctgaagaaccaaggacacactccgataagattatgtcttgtgtcatgcttcccattggtgctgtggtgatggtttttggattcgtcatggctattacaaatactcaagactgcacccatgggcaggaaatgttctactgctttcctgacaatttctctctcacaaatacctcagagtctcatgttcagcagacaacacaactttctactttaaatattagtatctttcaatgagttgactgctttaaaaatatgtatgttttcatagactttaaaacacataacatttacgcttgctttagtctgtatttatgttatataaaattattattttggctttta

SEQ ID NO: 46 - protein, 149 aa, Homo Sapiens [sequence omitted]

SEQ ID NO: 47 - DNA, 96270 bp, Mus Musculus
  misc_feature (4599)..(4618): n is a, c, g, or t
  misc_feature (6284)..(6798): n is a, c, g, or t
  misc_feature (11876)..(11895): n is a, c, g, or t
  misc_feature (18911)..(18930): n is a, c, g, or t
  misc_feature (22825)..(22844): n is a, c, g, or t
  misc_feature (33428)..(33702): n is a, c, g, or t
  misc_feature (49360)..(49379): n is a, c, g, or t
  misc_feature (52351)..(52659): n is a, c, g, or t
  misc_feature (60978)..(60997): n is a, c, g, or t
  misc_feature (62021)..(63158): n is a, c, g, or t
  misc_feature (64206)..(64225): n is a, c, g, or t
gtgcgactgccccgccggcccgctgatggatcaaccaaggccactcggtgcgcaccaccgacgcgctctagctcatttgcatatagacgggcgcggcgctgcgacaggagggagcgcgggcgcggccccgggcggtggcgcgcgcgcgccctgacagctcggcccagctcgctcactcgctcgttcccggcttccgagcacagcatggcggtcaaggtgactccaactctctgctgctgcttttattgcataagagacgttccaagggccccgagtgcagccccccgcctctttccgttgctttctttgcctggttcttagccagtgcgtcccggggctctagattgcgggtggagagctgtgctgggcttggaccggagcgaagaggatgcccggctgggggaggggaaggaggagggatcgtgagttggaggggctcctgaggaccatggtcgggaggaggaaaagagtagtgttttgtcctaggtacatgggattgcgagcacagagttggagagcatcagagagggactgagagtcagcgggcaggagaaccggggatacccagggcatccgcggtgggggagggggtgggtgttgtcatttggggccacaatacagcccagggcactggttgacatttgcctggcaggttgtcggatgtcgaaagtatccgtattgtggcagctctcaaggtttaggtcagatggagaaagggtcgccaagatgacgatgtactgtttctgctttccacaagaaaggctgctaggcccggctattaatttggctgttttacatctcctgttgctcctctcttgaggctctcaggatttgtagcttggtggttgctactgtattgctagtagttgtggaataaagtaaacgattacattggtttccctttccagttcacaggaagtgccgtctgtaatttgctctatcttgcactattcacacccttttctcccaccccttagccgtagatctccggtttgacaggtgttatcagcaattaagctttgggtttgtttttagactaaatgaccttatgaaagataaatgagttgttagcagatgtaaactataatctaaagagattatgtggtttctagctaagcattaaccagtcattcccccccccccctcaggtgcatacaaccaaacgaggtgatcctcatgagctgagaaacatattcctccaggtaagtgaaagaattttacatcagggaaagaatgggaagaacatgatcgttattcctctttaagctctctaactttgagaaatgctcttctcacaaacatgagtggaggatgtcctttgtacttggtttgttttggtttttttttgagacagattttccttgtgtagctctggctgtcctggaacttgctttgtagaccaggctgtcctggaactcggaggatctacctgcctctgcctcctgagggctgcgattggctctatacccggccgtttgtactcttagtaagaacggattggaaaatttttctttctattggggattgatatgaggttttcctggagttgctctttttgtttgcatgacttaggatgacttataaaattttccttctcataaatgtctatgacatttgttgcacagataatttatgactattgtagttgcgctttctcctcccacttattgcaaccatagatggggatgggggtaggggttggtacaacatgtttgctttagattcttttgtaaggaggctggtaagatgactcagtggataaaggtgctttacccagaacccatataaatatcgaaggagagaactaactatataaagttgtcctctgactttcatatatctgtgcatatgcaccagtgctcacacatctgctccttataataataaattattttttaaaaaggggtggggagagatggctctgcagttaagagcactgttctagaagacctgggttggattcccagcacccatatggcagcactcagccatctgcagtccaattccagggaatctgtcatctacttctagcctctgaggacatcacatcacatgcatgtggtgcataaacatacacacgttaaaaaaacggaagtcttgccgggcggtggtgacacacgcctttaatcccagcacttgggaggcagaggcaggcggatttctgagttcaaagcctgcctggtctatacagagtgagttccaggacagccagggctacacagagaaaccctgtctcgaaaataccaaaaaaaaaaaaaaaacccaaaacaaacaaacaaaaacaaaacaaaaccggaagtcttgtaaggattgaccttaaaataccttacttatgttaagcttttagaatcagtcacctgactacgcctagttttttgcctttgctttcttaaattcctaaggtattttactaaaagttatgtttttcttggaagagctgttttttagaatcttgtattctggttgtggagtctctgtagactgttaacctcgggcagactccttctgggtattattttccactgtaaaatgaaaggtgaccttcaaggttgctttccattccaaaagtctgtgattctatcttaggaacagattctagcgtctgctaatgagtctaagctggatagcacttccatccgggacaggtagtttcctcaggcctggtggggaggaggaggctgcataggtgaccacacacagtgtagtttatgaaagagaattggtaaaggtcagggataaagtgtttctctaccttgctttagccctgcatttgagtgttagcaccaaaagaaaacaaaagagaattagaaaaatgagaattatttttaatttttatgttttagactaaggctttttaggtagcacagcctttctttctttcatatgtctttgtttattggagacagggtgttaccatgtaactctggctgccctggaactgttacaccaggctgacttcaacctcacagagatctgcctggggtaccttgaacttgtttgatctttctgtctcaagcctcctgagtcctgggattataagtgtgtataaccttgcttcttaggagccttgagttttacaaagtgtattaaaaggatcctttctggaacaaaactagttataatagagcctcaccatttgtgtgttaagacctttgttccttacaagtgttgtttggggttcacaaaaacatattagtataagccctgtactatgattagggtcagttgtttgtggagaatttgtatactatagctaattttattttctggttacatatggaaacaatcagctgagatgctctatgatgtagtaagaagagtacaggtatcaggaacatgtgtatccctcaccccaagttcaaggatgcccccaatgtagaccaggctggccttgaactcacagagatctggatgcctttgcctctcaaatgatggtattaaagatgtacatcatcacagctggctttttttttttttccttaaggaagatgggtttaattcgcaggcctcggtctctatagctccctatccttaagcgaattatttagactttccaggtttcatcttctcatgtgggacccggtaaaacataaggaaatgggaactgatgtcttttcttttcttttttctttttttttttttttaaattgagatagaaggttttttttttaaatttttatttatttatttattatatgtaagtacactgtagctgtcttcagacactccaaagaaggagtcagatctcattatgggtggttgtgagccaccatgtggttgctgggatttgaactccggaccttcggaagagcagtcggggtgctcttacctgctgagccatctcaccagcccctgatgtcttttctagttttagaaattctatacagaaaagaaaatgtgactcattattcatttgttactggtttgtgtgtgttgttctttgggctgggtagtgattgtcggagcttggaaagctcataactatgctattttagcttttcatatactttttgtggtatcttttttgcacattattattattattttgtggtgctggagaatcaaactcatcatatatattaggtaaatattataccactgagtgacaccttacttctttaaatattattttgatattgtctttattttatttttgtacagaaaacttgtggtttattaatttatattcatcattaaacataaagtagtgactcaagcattattattgttattattaatagtattattattttatttgttcatttgtttttctagtcagaatcttgctacatagcccaggctggtctgattctcattatgaagctcaggctaatcttgaattcattgttcagattacaaacaggaggcaccatacttggcttctgcagtattggaaggcaagagagaaacagtgtagagttgcttagtccccaggaaagcataaaactgctggaaagactttgcatctagttggagcaactttttgttaccttctagcatattaagattttattcctggtgccaggcggtggtggcgcacgcctttaatcctagcacttgggaggcagaggcaggcggatttcttagttcgaggccagnnnnnnnnnnnnnnnnnnnntaatgagtctaagctggatagcacttccatccgggacaggtagtttcctcaggcctggtggggaggaggctgcataggtgaccacacacagtgtagtttatgaaagagaattggtaaaggtcagggataaagtgtttctctaccttgctttagccctggatttgagtgttagcaccaaaagaaaacaaaagagaattagaaaaatgagaattatttttaatttttatgttttagactaaggctttttaggtagcacagcctttctttctttcctatgtctttgtttattggagacagggtgttaccatgtaactctggctgccctggaactgttacaccaggctgacttcaacctcacagagatctgcctggggtaccttgaacttgtttgatctttctgtctcaagcctcctgagtcctgggattataagtgtgtataaccttgcttcttaggagccttgagttttacaaagtgtattaaaaggatcctttctggaacaaaactagttataatagagcctcaccatttgtgtgttaagacctttgttccttacaagtgttgtttggggttcacaaaaacatattagtataagccctgtactatgattagggtcagttgtttgtggagaatttgtatactatagctaattttattttctggttacatatggaaacaatcagctgagatgctctatgatgtagtaagaagagtacaggtatcaggaacatgtgtatccctcaccccaagttcaaggatgcccccaatgtagaccaggctggccttgaactcacagagatctggatgcctttgcctctcaaatgatggtattaaagatgtacatcatcacagctggctttttttttttttccttaaggaagatgggtttaattcgcaggcctcggtctctatagctccctatccttaagcgaattatttagactttccaggtttcatcttctcatgtgggacccggtaaaacataaggaagtgggaactgatgtcttttctagttttagaaattctatacagaaaagaaaatgtgactcattattcatttgttactggtttgtgtgttgttctttgggctgggtagtgattgtcggagcttggaaagctcataactatgctattttagcttttcattactttttgtggtatcttttttgcacattattattattattattattattattattttgtggtgctggagaatcaaactcatcatatatattaggtaaatattataccactgagtgaccccttacttctttaaatattattttgatattgtctatatttttgtacagaaaacttgtggtttattaatttatattcatcattaaacataaagtagtgactcaagcattattattgttattattaatagtattattattttatttgttcatttgtttttctagtcagaatcttgctacatagcccaggctggtctgattctcattatgaagctcaggctaatcttgaattcattgttcagattacaaacaggaggcaccatacttggcttctgcagtattggaaggcaagagagaaacagtgtagagttgcttagtccccaggaaagcataaaactgctggaaagactttgcatctagttggagcaactttttgttaccttctagcatattaagattttattcnnnnnnnnnnnnnnnnnnnnnnnnnnnnnnnnnnnnnnnnnnnnnnnnnnnnnnnnnnnnnnnnnnnnnnnnnnnnnnnnnnnnnnnnnnnnnnnnnnnnnnnnnnnnnnnnnnnnnnnnnnnnnnnnnnnnnnnnnnnnnnnnnnnnnnnnnnnnnnnnnnnnnnnnnnnnnnnnnnnnnnnnnnnnnnnnnnnnnnnnnnnnnnnnnnnnnnnnnnnnnnnnnnnnnnnnnnnnnnnnnnnnnnnnnnnnnnnnnnnnnnnnnnnnnnnnnnnnnnnnnnnnnnnnnnnnnnnnnnnnnnnnnnnnnnnnnnnnnnnnnnnnnnnnnnnnnnnnnnnnnnnnnnnnnnnnnnnnnnnnnnnnnnnnnnnnnnnnnnnnnnnnnnnnnnnnnnnnnnnnnnnnnnnnnnnnnnnnnnnnnnnnnnnnnnnnnnnnnnnnnnnnnnnnnnnnnnnnnnnnnnnnnnnnnnnnnnnnnnnnnnnnnnnnnnnnnnnnnnnnnnnnnnnnnnnnnnntggtagctgatatatttaaatcaaatagagagtacactagctcagcgctccaaacatattttgttgatgttatgctcttatgaggtagacttggtagatctgttatgtagattaaattaaatggcttggttaatgttattgagtttataagggaagctcaaatcaagtgagttctttctttaaaatgagcacaattagcaggctgtggtggcgcatgcctttaatcccagcactcaggaggaaaaggcaggtaggtctttgatttcaaggccagcctcctggtctacagagtgggttccaggacagccagggctacacagagaaaaacaaaacaaagcatagtaaagcaaaacaaaacaaaagcagctttagtggatccagcattcatgaggcagaggcaggcagatctctcagggtcctaggtcagtttggtcttcctctcaagttccaatccaacctggaacttgtgggagaaattttatggggtctgttaacttgtacaatcaggttgtaaaagaaagaatctaaaactgccccttccctttgttgggacagggtctcactgtacaactctagctggtctagaatgctctttgtagaccaggctgaccttgaactcagagatctacctgcctctctagtgctgggatgacagactcgcaccattatattggctgaaccccgccccctttgacctcatttccattcacctctagaaggcctttaattatcattgttttggactgggtcttactcactttgtagccctagctcatccccaccttgcaagcctcctgcctcggctcccaagtgttgagttcacatgcagagctaccatgcccaggactagaatatatatatatatatatatatatatatatatatatatactcttaacccttgttattgcatgctgagaggattttggaatgaggtgatcttttttgaaagacagagttatattagagattttggcagctaaattttgccaagaatattaaagacaaaataatccggctacttaggaggtaaaattaaaatgtgcctctgtgctgtagctacctaggaaaaattggctgaggggtttgggtttgaagcagtaggtagactctgtgggtttccgagtgggcaaattggagtggtaaaacatggcagctctttgtgtgtgtgtgtgtgtggggggaatagagtgtggagagattggcagtaagtgggggtatcagctaagaggctattgaaataatccatgcaggtgtaatggcctggggagctagtgtgtggggaaatggaaaggcaagacaacaccagggactttgtaagcacagaggcttggatttgccattagctatggaaggattggagggacagtgaatcttgggtttctaggagagatgccagttgattgggcatctgtttatggagttgtatggtggctagagttaagcttgattgtaaatagatgtggcccactaagttaaagtcctgataggatggatacaagtttgtatgggtgctagactaatccctgttaggaggactgttgaccgggcagagaaccaggagccagtttatacctgacattcctacttgaaggaaggattgagctgggagaggggtgccatgagagtctaaagtaggagtttcaccagaaggctaagtctcaaaggctaaagtatccatcatttctttagtgtagtctggcttgggaaggacttggaagttgaattgagttcagtatcatttgggctttcttctagaaagtctatctagagggctaaggaaatggctacgtaggtaaaggcttgccacacaagagtgaggcccagagatgcctggagcccacataaaagccaagcaggtgtggcagctacagcctgtaattcatttactggagaggtagagtttgggttctgtaagagatcttatctcaaaattacagagcaatgttagaagaaactcaatgagaatgtagggcctacacatctacatatgcatccacatacatgtgaacacatatacatgcatactagccatgcacatatacctagaattttttttttctggaactcactctgtagaccaggctagcctcagagatctgcctacttctgtctctcaagggctggaataaaaggtgtatgctggtatggcctacttacctgtgttctttattacttctcaaaatatgatgagtgatttttgtttcctcttttctcttctcttttcttttcttttcttttcttttcttttctttctttttcgagagggttccatgtatcccaggctagccttcaattcacagagtagctaaggataacattgaacatctgatcttctgtttctacatccccaagtactgggcttatgggtgtgtactactactcagggccaatgtgttaggtctcaaaaccaggcttttatgtcaggcaagcatcctaccaactgagctacatacctagcttatgtactttctgttagttaataaacaggtgtaagggctggagagatggcttagcagttatcagcacctgatacttgtacaagggctggggtttgaatctcagccctcacacagtggcttacaaccattggtgactccagttacaggggacccaacaggcatgcatgtggtgcacatacatgcacttatgtatgtacaaacatacatacacccatacacataaataagtaaatcttaaaaaatcaaaataaacgatgtattatttttgggcctctgcctttcccctccgagcccaggaaatcagatcacaacagacggattcttagactgtttaactgcactgtaattttacagtgggtcctcaatctaaggttttactatggacgtccttatacctgtcatctccccagttatctctttcttcttaagcctttctctcccacacactatcattgacccagtttttctccatcagaagtatacagcagtgaaagaagtagtaagaggcaggcggggtggggacagaggtgtttgttacagatctgacaaatgtcagaaagatgacttaaaagccatctctgtgctttgtgacaaagtaggcttgcaacaaagttttacaatttttaaagcatctctcaactctttttagtaggtagactctgtgttcacttactgatttattatagtcctgatgattatagtccatacagctatgtatgctggaccaaaatttgctgagatacagaattcaaatattattttgatttctgttcttttcttcattagcaccaatggacaatgaaggtcacaagacctatgaaattgcactttttgaacttaagtgttatttgtttagttttttgtttgtttgtgatgcatccaacccaagaccttggtcatactgggcatgtccacccaactacatccctagccctatcttgtttattttagattgaagaagaaatggaaggtggtgatgataatgtacagtgagaatgagtttcttgaggttctgagatgatgtggagtgtttggtggaaagaagtcttctttggctcactgagtatttgtttacgtgctatgttgtttatctttgaaaggaaggttgagaagggactgaagcagggctttgagcaaagggcccttctgacctgtgttgtcatgtgtgggaggtgcatcgctacagagttacgagagagagattaaggagctggggacatgacaatcagtaaagtgcttgtcatgcaagcatgaagacctgagtttgaatccccggcatctaggaacgactcagacaaagaaaaactcacacacacaaacaggttactacagggataacaagttcaataaggagataaaaagaatcatgaaggggccaggatttttcaccatttcaagaggctggtgaatgctcctgagagtattatcagtgttgagaactgaactgcaactcaaggggaagtgctggaaaggattccacatctatgcatgaagctcggatgtagaaaatagttcaatatgttcaacagctagaaaggaagctggtggatttgaatcatcagtgagtggggagactgtccagaaatgaggctgaaggagccatgcccagcatgcctttgtacctaggccatgcagagaacttggatttttttttttaaatatatatttattttttttagcaagcaagatagaaaacagtgaaggccttttccccctttccctttcgaatggttgaaattatggtttcacagaacatacttaagtagatcatattgatatgtaaactgctctttctgtttccatgcttcctgtggacggctgttttgtattgactcttgattctttgagtttaatttccttctatctgtcaacggtgttcttagaacgtcttgaactggataaagacatgcaggaggcctcagaatccagttggagccaacctgggctttgtagataaactgacatgggctttgttttgctttttaacatcttgtgtgtttgttttggacttgccttgcttctacagacagtgtttcactaggtatcccaggttgaacttgaactccaaatcctccttcctctgatccactgtgttgggttataggcattgaccaccacacctggccgccaccgtgggtctgaatcctcatttgacccttttttaatgtgccttaggtatttattaaactgtccttggagtctgttttctgtctaaggtctaatactctcatacagacaggtgttgtaaagattaaatgaggtgactgctaaagtgtgcctgatgtcctgagaagcaaaccaagtttagtttcttgttacagttctgcatagagatgaagactttttccccttgaatactatcttaagtttttgcctagataactgtgctgaaattaataaagtgacttagctgttaacacgtgcttgtcattgtactggctgtttttgtgtgtcaacttgacacagctagattcatcaaaaagaaaggtgccttggttgaggaaatgcctctcatgagacgcagctacaaggcactttctcaattaatatcactgggggagagcccagcccactgtgggggtggtgccatccctgggcctgatgggtccctgtgttnnnnnnnnnnnnnnnnnnnnaaaaagaaaggtgccttggttgaggaaaatgcctctcattgagacgcagttacaaggcacttttctccaatatcactgggggagagcccagctcactgtgggtggtgccatccctgggctgatggtcctgtgttctataagaaagcaggctgagcaagccatatgaagtaggccagtaagcagcatcccttcatggcctctgtatcagctcctgcctccaggttacagccctgcttgcgttcctgccctggctttctccagtgatgggctatgatctggaaatgtgagcttaggtaaaccctttcctccccagcttgcattttggtgttttaggttgcagggatagaaaccctaactcacaaaatcatcatgtctgagtagtcaggtgcatttttaagacatgcatgtgagtgtcttcaaaaaaggccccattgcagatggagcaacctcagtggtaattctcctggacagttctgagaagatgtatggtcacagtctgaggctgggagatctgatactatggcaggcagcagctgtttcctccagaactgtcagttgcttggcggagaccagaaaaacaataatggttcgattataaactgttagtacattcagaatcactctgttactttctactttaaaaaaaaaaagctttttgtggctgaagagatggctcagtggttaagagtacttgctgctgttacgtacaatctgagtttggttcccagcacctgtggggtggcttacaaccatctgtaaccctagttccaggggatttaataaccttagtctagcctctttgggcaagcatgctcgctctctttcacacactctctctcacactctcactcactcacacacacacacactcactcaaacacacacaaatacaagtaaaacatataactgggcagtggtggtccatgatgcctcaaatgcagctctcgggaggcagaggcacaagcatctgtgagtttgaggtcagcctattttacagagtgagatccagggcagccagggctatacagagaaaccctgccttgacaaaccaaaaataaactaacaaaaaacatatattaaaaaataataagatccaggctagattcattcactgcctttggttgatctgtccctctgatcatttcaacatctgctctcaggataaaaggcttcttttcctgtggcagaatgttggtctaaaccttaacaacaccaaggtatgcgatctccctaggagctgtatcttggttatcaaagagagacagtttttccaggcttatgaacatatacgatccttgtatgttcccatggttacttagaacaagagattgaagtatttacttgaagaacaatacaaattaattatttatcttaatctcccttgggaggccttctggttccagttattggactctctgaggtcattattttatttctaaggtttctgatcaattttaaaaagaaaatcattttggaagagccagcattagttcattacttacaatgcctgctctgttaggaattacattgccctagctgatagtaggtctagctataatggacagagaaaacatatatgcgttttaagttttgcaatcttttgaaacattagtttgttattgtgatgttgtttctctctttccacctccacgcaggttctggggtttgaattgaggacattaggcttgtgtagtcaggtagcaagctcttacacactgagccatattgcaagctcaatttcgaagtatttttgtctatttttaatgcatgtattaagtgtaaagaaaaataagccctagcatttatgggaagcattctgagcaagaaaggcaggattctggggaactttgtttgcaaaaatcaaatagggtttgtttctgatggatctgaaggctatctacataaatttaatatgtatattaaactcagatatatgagtctgagatgtaatttagtgagtagagtacttactctgcaatcacaaggtcctgaatttgacccccaccacctcataaaattgttccggtggcacacatctgaaattgctgcccggtggaggttgacgcaggaatgtcacaagcttgagggtagactgaagtaggcacaagaccttgctgcaaaaagcctagaaccgagctggtaagttggcacagcaaataaaggtacttcctgccaagcctaaacacctgggtcctgtccatgcacctacctcatacacacaataaacagacaataaaatgaatgaaccgcttttccttaaaacacaggattttagtaagcttggaaattttaatactactcactaaatttttttcttttaaagtatttctatgccttaataaagtttataaaattaaaaaagtcagtttgacctttttttgtttatttttaatttatttatttttatttatatgagtacactgtagctgtcttcagacacaccaaaagagggaatcagatcccattacatacggttggttgtgagccaccatgtggttgctgggaattgaactcaggacctctggaagagcagtcagtgctcataactgctgagccatctctctagcctgtttgtttggttttgagacaaggacttacactgtagtcaaggctggacctaaattcataatcctcctgcctcagtcttctgagagctaggtttacagacttgagacaccacaccctgcatgtcatgtgtaggaatttctttctttccctttgaaacatgtatgatggaataagctttcatccccatggagtcagtatatgaaaataaggttaatcccactgctgtgcaagggctgtgtgtcaggtgtgccctggtgtctgcccctcgtgcaggctgcgtgttcagtgaaagggcacgcgttcctgactaaatttggcttctgtgggaagcacaggctgtaagagtggacagtgaggattagcttcatgctctcagcccttgccctggtacataatgtcctcctcaattgttcttataactcatttttccacacgggaaacactctgggtgacacccctagttaccaacctcagtgactgtcctctctggagccagtgaaactggacggatgttaagatctgaaatgttagtttatctcaactggtctggtcctggagacacagttttgactcaggttacagccgaatgttggatatgcagagagagctgcttagagctgtcacggctgacctgctggcaagctgacccctaggcaaccttggtttgaaaggcagagaggaagaagagtaaccctttcatgttaggagaaaagcaagaagttctgtaaggagggaacttcccttctgtttgtaagtgtgctcccctcccccaccagacaggctttctccatgtagccctggctgtcctggaactcagttgatagagatctgcctgcctctggctccagaatgctgggattaaaggcgtgccccaccactaggcttccaagcgtttcagagtatgagttcaacatttgtgttttcacatttccaaatacattggtagtaaagatccccttttcctcccaacaacgggtcagcttttgctcacaactccttgtcagagaggaaactgagagaagtgcggggatagttgctgatttacagatgccgtccaccggcaaggccaggctcttctcaagggactctaatgcctcagcttctcattagctgcaaggacagctgccactgtgcccagttgacctttagccaagaagtcccctatgagttactggccccggattctgaccctgattttattgtccatccttcctgacctggggtgtgtctcactcatctgcagtgagacccgtctgtttaggccgcaactgtcaggcccagcacgggacttatgatgaacataaaaatgacacaaacagatttgattgccacagatttctggcttaaaaagtagtttttctagatatgtgacctcagttttggttatgtgtattttttttttaaagtttggggctggtgagatggctcagtgggtaagagcacccgactgctcttccgaaggtcctgagttcaaatcccagcaaccacatggtggctcacaaccatcggtaatgagatctgactccctcttctggagtgtctgaagacagctacagtgtacttacatatagtaaaaataaaataaattttaaaaagtttgatcttgttacattaatttctgagttcaaggacagcctggtctacatagtgagttccaggacagccagagcaacaagggagttttgttgtctcaaaaacaacaaaaataaaaaataaaacaaaacaattaaaatatatacatattctggttatctattcaaaattcttcacagtttttaaaaatatttttattttaaattatatatgtatatattacatatatgtatatatgtatgtatgtgtatatatatatatatacatatatgtatgtgggtatgtgcatgtgaatacagtagctagcagaggccggaagagggcatcaggtctgctggagctggaggtataggtggttttgtgctccctgatatggctgctggaaactaaaccctaaagggaagtgagtactctcactgctgagccatctttctagctccaacaactgaattctcatttttgtcatttattcacttatttgttttttgtttgagtctggatcttacctgtaccctacactgaccttgggcttgctatttaaacacaggttggtccaaacttgtcgcagtctgtctgcatcagtctttctgagtgttgcgattacagcatgagttgctatgtccaggacagccagagcaacaagggagttttgttgtctcaaaaacaacaaaaataaaacaaaacaattaaaatatatacatattctggttatctattcaaaattcatcacaattttaaataaagaaatatgtatgtgtgtgtatatgtatatattatataattgtatatatgcacacacatacacatatatatctatatatgtatatatataggtatatatacatatacacacatttgaatcaaaattatcaatgaatctatttttaaaaatgtaccattcaaatggataacattttatcatctttagactttaaatctgtcccagttatgaattttttaggtaatccttagtagaaatttagagatgtctgagcctttgtaagctataattaacacagttagcttctgaggtaggtgtcatgtatttgaaaggtcacgtaaggttaatgttagtaaattgcaagggagttagtactctccagtttacactggtcaggtgagcccttgatgctttcatctcttggcttcaaccggtgggtggcatgatcctctcccctcgggccacagatagttcagtgtaattacaacatactcctgtatacgaaaccctgccaactttcatgtgtaattttgattacatgtatgggaactccaggctcccataaggtcaattttgtttttctcacctcagacagccaaggcctcacgcacgtgagaatgctaccttcgaatgcgtttaaaagtttctggaaatgtcaaaagctgtgtgcccacttgcattcccagtatttgcgttgggttgacaaagtttcatctagaagctcgatcgcttgtgtttgtcagcttcttcctgtcaatgtctttcatgtgtccttgacttcttgcccagaagggatttacaactgcttaagaaacatctttaaaatggcagatgattaactctaaagttatttggcataagaatataatatttggcaattttatttcaagttattttaggttacccttttaaataataggataaaaacggaaaaagattccaaaactattaaattactaagggtattaaatctttaacatagtgttattttgaaagactccaggctttatttaaagattttatttcagatcatgtgtatatgtctgtgtctctctctatgtgaatgcacacatgtacaccaggtccttagaggtcagaagttagtgttggattctgtggagctggagttagaggctgtggcggcctgatgtgggttctgggaactgaactctggtcctctggaagagcagcacgtgctcctaatagctgaaccctcaaaatactattttaagtctttttttcccccttttttggtataaatatttaaaaccttttgattatcacagagagaaggcctcaatatttttatttctattcttctattaccttatctttattcttttccttctctgtctcttagtctctctgtttgagacaggctcttgctcactgtataggtcaggctggcctcaggttccctagtgcaaggtctaaaagcaagcatccccacaagttacctttccttcctaaaaagtaaaaataagaaatctgtgttcaacataattaccaggctggctctagcagcctgtgtgtaatctcaccacttaaaattggacagaggaactgtttttaaagtacttttggggtttaaatgcaacacacacacacacacacacacacacacacacacacacacggcgcacacacacacacacacacacacacacggcgcacacacacacacacacacacacacacacacacacacacacacacacacacacacacacggcacctcgattttattttgttgctaagggttccgctcaagcacacctgatcctctttagagtctaatgatttatgcgtgcacagcactggcgaggtggctcagattttgaaactgcctgctatcaagtctgataacctgagtctgaaccctgggacttcggtggtggaaggaaagaacccatcactgaaagctgccctgactttcactgcactgtgccccgggtgcactctttcaatgtacataaagaaatgaatgagtctatgcatgggtgtgagtgtatgagtgtgcaagtatgtgtgtttgtatgactgtgtcccaagtgtgtgagtatgcatgtgtgagtgtatgaatgtgagtgtgtgcaggagctggcactgggtattgatcattctaagtgtgtgnnnnnnnnnnnnnnnnnnnncaaggtctaaaagcaagcatccccacaagttacctttccttcctaaaaagtaaaaataagaaatctgtgttcaacataattaccaggctgacacacacacacacacacacacacacacacacacacacacggcacctcgattttattttgttgctaagggttccgctcaagcacacctgatcctctttagagtctaatgatttatgcgtgcacagcactggcgaggtggctcagattttgaaactgcctgctatcaagtctgataacctgagtctgaaccctgggacttcggtggtggaaggaaagaacccatcactgaaagctgccctgactttcactgcactgtgccccgggtgcactctttcaatgtacataaagaaatgaatgagtctatgcatgggtgtgagtgtatgagtgtgcaagtatgtgtgtttgtatgactgtgtccaagtgtgtgagtatgcatgtgtgagtgtatgaatgtgagtgtgtgcaggagctggcactgggtattgatcattctaagtgtgtgctctcccaaggtagacctgctctgcagcctcggtgtcacttattgttatagtgacagctaacatctaattcgttttagcattttaaccaactctgggtagcttctagtttccattcagtactctctttggttctgtctgttcaggcaacaggcttcctgacattgccaagtaattgcctctaatgtaatgggttaattagttcactgctttctgtggaagtcaagaactgactcctgcggttgagaagacttagggttcccccgccccccctcagctccacactctatctttcagttaaaatcaagttaaagcagactaggagagtcagaggaaaccctggcagagtacctgagggggagttgttctctggcatcatttataactgtaggtactggcaaggccggagtcagagcatgtcaacaaaaccatttgttttcctccttggcttctgtgtccttggtagcttgtgctaatgctgctgtttcctggattttacagtcagaggggatcctggggactctttggatcccacctactttcactgtgtattcagggcaggcttgtcctggtagctaggctcagacactgaagaacacatacctctggaaggtaatttgttactaagaacctgatgtgttctgtgtttcctccctgttcttaagtagcataggttgaacattgattgctattcctaaacattgaggcctgaaatgcttcagaatggaagtttgtttttttccaatttttaacttttttccctcccctctttccctttctcctgctccatctggcccatagattctttattatttgtttctaattatagatggttgtgagccaccatgtggttgctgggatttgaactcatgacctccggaagagcaattggtgctcttacccactaagccatctcaccagcccagaatgcaagtttttgagcattgatttgataataggggtagcaaattctatacctaatgtaatgggctgagatcaagacacaagcacagtgaaaaaaggcattaaagtcaccttcgggctgcttacagaaaggtgtgtagattacttttttcttgctgggataaagcactatgactaaggcaacttctacaagaaatttatttgggctgacggttccagaggaatgagcctgtcgtggcaaggaggcaagcagcagacatggctacaggtgcccgaagctgagcgctcacctcttcaaacacaagccggaagcagagagggaaatggagctgatgggaagtttttaattttttaatttctaagtccgcctccagggacacacaaggctataccacctaaacctccccagacagcgaccagctagggaccaagtgtccaaatgccccaggctatgggaacatttttcagtcgaaccttcagagtatgcatgaaacagtgggactttagttttggatactttaaggggcaggtgtggcggtctctttagtgtcccagcactagagagaggggaggcaagaagaatagctttgccgggtatggtggcgcacacctgtaatcccagcactagagagaggagaggcaagaagaacagcgtctactatatagagtttgagaccagcctagactacctaagaccctgccttttaaaaaaaaaaaaatcaaacaacccaacaaaaataacagcagtaaaaagatttcccattagtatatgcaaataatctgaaattaaaaatccttctctgaagtgcgtagtaaataaaatacagcacacgctatcgccagctaggcaccgctcgtggtctcagtcttgtcccagcccggtactgagcccgaatgttgttctttgccaaggcctctccagatctccaagatagctctctccccgcagctggctgctgccaaacctgctcagcactcctaaattttcatggctagctggggcgccgcactcttccaaacccacactctgccgtggttacctttccctggagctcagttgaattgccacgagatggaaaacaccagacaatcttagtttagaaccaaacgaataacacaatcactgggcacagaatctagcatcctagcatttaccaactactctatgttagaaatcttccagtggtggattctagtggactccgccacctgaactaacagcccccgggcgacatcttggttacctggcttccaccgtccaaaaggaagtcccctactcctgctttcccctttcctctctttgaccaggaaggtccgcctccttctcgcccagtgattggcttcttcttgtctttaaccaattaggggaaaattcctctgttcttgtcctagtcattttggagtctgcatccatccggagtctgcatccatccatccatccaatcactttttctatgtttgtgagtgtggtgtatggtgactatggagtagggataggggcacctacaagaaccaatgtacaccttctcttgctgaacctgcagggagactgacagtcaacaagttccagcaatcctccagcctctgcctcccaagtgctatggttacagaaatttgcatggtcacccttggtcttttatgtgggtactaggaatttgaactcgggtctcatgcttgggtagcaagctctcttacactctgagccatctcggaaactatatccactccatccaccctctcattctcttgtttcttccttttgtcttttataaataggaaacgggaacacacagttacatgcttctctgtcctgtgtcgtgtgtcatcgtcctcctgcccacccccactccgaccaccctttttggtggtgttaggtatcaaacccagggcctcctccacggtgtgcaaatgccgtacctgtgaaccataccctcagcccacactctcttcttatttctttctccaattagcccctctcccagataggaacaaagatttttctcatttctgcagccgtccactcagattgaaatcagatatgctgtctccctccgccccacctccgccccactcctttggtcttcatgacgctctggcttcgttttgggcagtcatgttccagtagcggtggttggcttgccagcctccttcaagtctgctgtcagatttcttttgtattgatgtcccttgccacttgcagtaaccccatgactactgtggccctctctttccaccccggcccgtcttcatcaaacctgtccagggactgaggatttagctcagttggtagagtgctcgcccagctggtctcaggtcctggtctgatatctagcactgcatggtagtcatctatgcagtccctgaacggggatggggtggggtgtggtggggtggggtcgggggagtaggtgggaatggttgggggatcaaggtaggaggannnnnnnnnnnnnnnnnnnngaggatgagaagttcaaggtcatagagagtttcaggccagcccaggatatagggatcctgtttcaaaaacaaaaacaaacaaatatctacatgtgtcctattatgccaaatgctgaagagcaaggaaagacatgtgtaacaagaactgctagaatattcttattgttatcagcatctagaattcaagtactgatagtgctaaatatctcaaacagtttgttcttttgttaaggttgattttcattattttattaactctgtctcctggagctagacttccagccgtttgtgagtcactgaactcatctgctgcgagagcagtgggatgcttttatggtgctccatttctctagccccgctttgctttttttgcttttgctcctttgcttatagacctgctctttcaacatatcaaaggctcactttatctttattgcacagaagcgtgcatgatctagagtcctagggaaagaatgagcctgtctaaggactaagatgagtgggtttgtagtagagccaggattaaaacacaagccgacttcaggactggcctttgaagtcatgtggtcagggcatgatggctctggacagaggtgcctctccagtgcttttgagagcggcagctagtgaagaagtccagcattattctgagtgcaaatattgtttatttcaagctaggttgtacttttttggttggttgcttgagacaggatcttgttatatagaccaggctggccttgaactaggatgcacctcctgactctgccttactttcccagtgctggggtttcgggtgtatgctgtctggcttaagactgtataagctatctatctatctatctatctatctatctatctatccatccatccatccatttatttttatttatttatttttggagtcagggtttctctgagtacccctggctgttcagaaaggacagctctgtagaccagccaggctggcctcaaactcacagagatccacctgcctctgcctcccaagtgttgggaaaaatgatatcgtttcctaagaaatggaacacgaaggcagaagagtgatgtcgggcatatggatatctcaagctagtgtggccaagtgtgcatccatctgatgcggagttggcttagttgagaattcccagttggaagtaatttttctcagacctccatccactctcttcaagtcacccagatatcttaatctggtgtttctctctgggaacttttaggattatcctttttctttatttttcctcctgctgtcctgcagttttatgggggagaataaggccttggtgagatttttacattaattctatctatctatctatctatctatctatctgtctgtctgtctgtctgtctggttattttgcctgacacttaatgagcctctctagtattcagtttgggaaagtctctgatcgtacatctttgttagtaaggatgcctggttaaccgctctgcacggagtccttgaaatgataaggagttttttggataagcatatcttaaagcaattgacataagaggtagaagaatttttctttcttttccagtgactaggacttggaataatggaagtcttctttagaatatggtaatttcatgtttaatggcagctatctgtgtcacccatagccccacctactctgacagactcttgaaaaaaggctacatctgggcagtgaggtgtgtgcaagtgtgaaagctcacctacaggccttggccttacctcctctttcctcagtctttctgttacctcttatcttaccagtatctttacttttatttacttattttatttttccagagctatagattaaactcagctgagaaagctatattccccagcccatgtagttttatacttacttagtgtgcgcatttgtgtgtgtgtgtatgtgtgtgcaagcatgtgtgtgcactatggcttatgtgtagaagtccgaggatagcttttaggaattggttctttctgactgtgtgattcccagaaattgaagtcatattatcagtcttcttaaccaatgcctttacctactgagtcatctctccagctcctatgtattttattttattatttatttttaaacatatatttattacctggtgtgcacacacctttaatcccagatttgggaggcagagataggcacatctctgtgagttcaagaccagcctggtctacagagttccaagccagggcagttacacagagaaactctgtcttgaaaaaacaaaccaaaacaaaaattttatttatttttattttatatgtgtggatattttgcctgcacttgtctctttgtaccatgtggtcgcagtgccctagaaagccagaagagggcggtagatcctctggagctggagttacagactattgtcagctgccttctgggtgctgggaactgaaccatgtcctggctgtcataattctgtgtttccatccatggacttgcctttgtggacattttatgtaaatgtgatcctacactatgagccttttgtgtctggttcatttcacccagcagattttcagggttcatcaatattgaccatgtatcagttcttttctgtggtcttcaactggtatctgggtgtttggcttccaggatccagaggcaatatccacactcattacccttattttgatttcgtaagtgtcccctggtttacttcccccaagcagctgtcagcgagcagccggtgctgagtcatggcgtcttcagtgtgccttgcttgcttgtctttcagtatgccagcactgaggtggacggggagcattacatgactccagaagacttcgttcaacgctatcttggcctgtacaacgatccaaacagcaacccaaagattgtgcagctcttggcaggagtagctgatcaaaccaaggatgggtaaggactttctataaatgttctgagaaccaattatatactttattcaaaaggtaaaactgtaagtttcacatcatctatctatctatctatctatctatctatctatctatctatctacctacctacctacctacctacctacctttttgatgttgttcttgttttgagacaaggtcttactatatagccttggctggtcttgaactcagagatcctcctgggtgttgagattaaaggggcatcatgacgaccagcctatatctggaattattttaaattgtattgatttatatgtgtgtaggtgtttggtctgcctgttatgtatgtacactgtgtgcatggtgcagtgtgagaggccagaagagggcacccattctctggatatcgagttatagatagttgtgagccgccctgtgggtgctggcaactgaatgagtgctgccgctggtgagagcagtaagagctctttgctttgaaattcacaaaggtggtattactgactgccattatcaagcgtattgtcatttgttattttcagaaaaatttgcatgagagaacccatattttatattgaatagtctgcttaggatggctcccccgaaaactaattttatttttgtattcatttatttgaagaatacggaatgcctgttactgtgtcagacaattattcttcgtgttagaatgtgtcagtgagcaagtcacaaatggcaggagggagcccttgcaactcctttgccacttatctccagtacaggagttggctcacgggactgcatgaggccagtcttgtccctctccagcctttctagaacctgagatgcttccggtgatggataagatcctcggcccttagggatctagaaatatagctgaaaactgctgtagtgaacaaactgtcctctttacttaattcagtaagtgctgcacgtgttccaacatccagccccacacaattttattaaggttaccagctccctgtgagggagggactaactccacagtaaggtgaaccgtgtcgcttctgtgacttcaccctcatacactcccaggctaaaagtaccacaagacgggaagtcattaaagacaagacacagcaaaaactgagctcatgaagaccccagtgtcactccaactacaccttctgcagtaacaaagcagtgccacagttgtcacaccaacataattacaacataaattttctgctgcttccatagacacacacacacatgcacacacatacacatacacatgcaaatgcacacacacacaatgcacacatatacacacatacacacacatacatacacacacacacagacacacagacacacagacacacacacacagacacacacacacacacacacacacgaatgttctttcatgtttcatgacacttgttttcccgccctgcaattcttctcccattttgttccacttccagaacggtccctcccccaggtttcattcaggtgtcactcttctatgatactgtcctaacttctcaaagagtcaaccaagctgcttggctgactctctatgtatagctcattactctgtttacccctcaaatactgacttgtttctttctttgtctagtcctctctttcccatgaagctatgggcctattcttaaggtcaacaacctcttttaattcatgcatatgtttataagacccaatagtacctggcaaattgtggtagtaaacataataccacaataccatctaaataggtagagagatgaatatagaccagacccaaagttcttcatagtgcctatatcctcctgtcccatagaactcagcacagtgcatggaatttgggacatccaaccaattgttagcttgatgagtcattaatgacttggaaggtgcatcattgtaatggcaggggttggataaaagttatacattttgtctagtattaaaaatgtcagatcagctcccaagctgctgatcaggtcatttatagagagtctgggtagtggttagactgacagtttatggaaatgagtgaatttaattagaattcttcattttgaaatattaaaggtaacattcattttgctcttttagaaaatatcgctatgtttgttgctcattggatctgagacctggttttatatttgtttattgaaacaagagtctctctatgtagccttggctgtcctggaacttaatatagagcaagctgaccttggtccacctgcccctgccttcccagtgctgggatcaaagatgtgggccgccacacttggccctactgttcccctttatttgtatttcatgttttgactgcatgtacatctgtgcatgcaatgcccaaggaggccaggcgagagcatcaaatcctctggaactggagttacatggtggtggttcaccgtgtgggtgctgggttttgaacctggatcctctggaagagcagccagtgctcctaacctctgagccacctctccagttccagacctggttttagaatacccatgttttcatgtaagaatttgattttttttaattatctggcttttttcttctctctgaaactttatatgacttttgtaggctgcggtgtattgttaaagtaggacattttaaaaatatagtcaagtagaatcctaatgttaagttgggagagtgtatcagtagcttttgtgtcgtgaagaatctagtaacattgtctcgggtttactcttttttgtttttggatacagagtctcactatgtagttcctagctggcctataactcacagatccatgtgactctgccgcccagtgccaatttttttttttttttctacatggggtttctctgtgtggccctgactgtcctggaactcactctgtagatcaggctggcttggaacacagagatccacctgtctctgcctccctattgctggggttaaaggtgtgtgccaccactgccaagcatgagtttacattctaaagataccttttctactattctgtttttaaaatgagttataagatatggtaattctccagcttcaccctcctaagtactgccttagagggatcaccaaagctggcagcagccttccctttctttctctcttttcctttcctttcttttctttttcatgtttttgaaacagagtctcaacccataaattactactagaaggagaggaaaatagtattctagaaagcttggactcttccctctcgtcgtcgatgcagggtataacttgaaatggcagcgatattatgtacaatcccctatgaaaacaatggaaccaaggaatgagtaggcttggtcaaggtaagtttatgtaacttggctaagtgtgaggtgagccctagcttattaggacgggtcagcagtctttggttggttccatctgagacctgcttttagaatagccattcttttacttaagtcttttgtgactgcttttatgttgcttttggaactttacctgcacaaaagtttgtgagagcagaacacagtacccaccagcccctccccacacccgacccatgttttctagcccatgaattactctttcttgccatctcccatctaccagtagacggtgaaataaggtgcttggtacagagagtcatgcagaggcagcatcgcgtggtataaatagcctgatggcttgtctaaaagtcagacatcagccaagtgttatttatgagattgtggcttaaactttggagttctagtttcgttatgaaaagcaaaatgactttatgcattaaatgcagatcacagaggctattatcatgcaatctgatctaaaatatttagacagttgcttctttgaaactgtaacttccaggatggtggtgtctatatttagtttagtcagagttctctggaagttctatctgctatactgggaagacccggtctttattctctgactcttcatgagtccgtcctttctttctttctttctttctttctttctttctttctttctttctttctttctttctttctttctttctttcttatgtaccgtggatgtcaaagacctattcattttggtagaacatttggctattttacaaaattttgtagaaaattactaaagtaacaaacatttaggcattatgttagtttccattctgatacaggacatagtggaaacatttactacacagttacaaaatgtgttacttcaaagtttcagataaaatttcccagcacctaagaggtggaagcaggaggatcaggagtttgatgtgctcccctgcaccccataaaaataatttaaaaaaataggttggtcaggtagaccttggccagggatgggtgcatgtctggcaaagctcggggaccccacgagctcttctcctgctgatggattcataggaaaggggatggctgtagctctgccctactggctctgatactctagccacgcagtagtgtggtgggtggtatgctgattggcaaaatgcaccaacttagtgggttccatggggtctgcattctaacaggggctgctcgctgcataaagcaaagctctgtgagtccccagtgtcctgaggtggagacagacaagatctacagctgtctttttggaggcagtttttgcttggcaactaagagctaccaagtgtcacttgggaccagaaactgcctgctgcccaagctcacaatttgtcaagggaaaaaaaaaaccaatatttttatgaaatcctaggatttcataatgttgtcaccaagtatattaggcagtcagaattcctagaaattaattctttgccacagaaaacatatcagtgggccatagtcagattcctagatagcagctttgctaactagggaagctcatctttgattatctctcataaaaaaagagaaagttttgttactgagcataaaatatgtttcaaagtgacttattctatatttcaaggttacttgtgtttttgctgctgaattctggagacttaaaaaaaaagaaattattacaagtttgtcattaaaatcagctcacctattggttttaacggttagacttatttttatagtcagcagaaataatgttagcctctcttcattataaattttaggcatttttaaaatatgtagctagcaggtgcttcgggtaccctctgcctctgcgtccttggtttcatgtcaatccaaacaacaccattcgtggccagcctttgtttcattcggttcaccccacatactgattgtctctctctcctcctcttcatctctctctccttggagctggatatggagttcacggtctcccatgtgcttagctacacctcacccagctgcttgcttttgaggaatgagtggttggtcctggtatcttgcaactccatctgttgttatgctcctaacatttgtttaatggtgactacattttctggggctggagagaccgttcagttcagccattcagcagagcactgaggaagtaggaagtgggtgtcggttggtacctgcgtgtggatgggcatggagatggtaggggaggcgtgtgtgtgattgcagccagataggagaatacagaaagtttcgtccatggcaggtaacagtttagagacttaaagggaagtggccttcaccgactggagagtagaaggggaacagaaagtcagggaacggagaaaacgggatgactgtgcaggttttagagttccttttttaggcgaagagagtgttctgtcagagagcatggtgagacacccatgtgccaaaactgccattggattgtgcaccttaagcatgagttatctggtaagtgaatcaaattgcaaaggcttttgttttgaggagagttttaagaagccccctggctacagtttaaagaatgatggaggaaggcgggaaggatccagaacattggtcaggaggctgttgccagtcatagctgttaagaacgggtgggaacatgctaggagatatatctttgaaggtcatttatgctggtaaacgtaaatatatgactttaaattggctttgtttggctttttgaaactgcagtccagggtggcctcgagctcctttataactttgaactccaacccctctgcttctctctccctagttttgaggttacagaagtgctcccccacgcccagatagctctttaagtttcatcttttcttttgggaacagggatcatcgctatggccctggctgtcctggaagtcactatgtggtacaggcctcaacctctcagaggtccaccggcttctgtctcccgagggcttggattaaatgtgtgtgcaccagcacacctggccttattttaaaattttaatatggtatttttttctaagaaagtaacctttccttaatcgtctgatatgtattatccagtataaatgttaactactgtgggactttttatttttctttttttttttttgtcctggaactcactctgtagaccaggctggcctcaaactcagatatccacctgcctctgcctcccaagctctgggcttaaaggcgtgtgccaccatcgtccagcaaaaaatgtgtagcccaggctggcctcgaacttgtgatcctcctgcctctgcctccttcagcaaatcctactggcatgtgccactactaccagcaggaactttttcgactaatatctttctgtattttcagtttgaggggaaagatggatttgtcaatattcataacagtgttcctttaagggatagtttgtcatgctgtcacttggatgatcatccattaagagcagcagagagagctagggagacggttcagggattaaaggcgaggctcacaatcaaaacattgagaatagcagaaagagccaagtaaaaaataatttaaaagaaaacaaacaagaaataataggcgagtcagatggaccttagccaggaatgggggtcatatccagcaaagttcagggacctggtgagctgtcccaagcctgactttctcctgctgatggaaatctaggaatgttatcggccacaaaagccgtggtacattgaaggctagtgtgttctgttgactccaagctcctaggtctgtcagtgagatctgtggtaatgacaccatggttttcggggaaggacacaagaagattggcagcaatgtgaggtgtatgggtcccaaatcccaggtatctaacttaacggtccacccccgagccctgggtgctatccctctctgtagacctgtatctgatggtgccttaaaaggtttatagcagtggtgacagtcacagctaaaccacaaatagtgtctgtttgtgccgtgcattgtgctggttgcttttctgtatattttttttatcacagatttctcaaaacaagcttgagacttaaaatgttaaatgttttacatataaggaagctcagaggctaagacacttgtccagggccatcagtccttgatacgataccctacttcctttaaagccacaccatcgttgacaagcttttgcaagacctagggtagtggttttgtaatctgtaggctttataggtgcacaaaccggtcattccagctctcaggaggtggaagcaggaaggtcaggagtttcgcattatccttgaggccagcctgggctacaagagattctcagaaagaaaaggcaggagctgggcgtggtggcacatgcctttaatccctgcacttgggaggcagaggcaggtggtaagaaaagaaaagaaaaggagaggcgaggannnnnnnnnnnnnnnnnnnnnnnnnnnnnnnnnnnnnnnnnnnnnnnnnnnnnnnnnnnnnnnnnnnnnnnnnnnnnnnnnnnnnnnnnnnnnnnnnnnnnnnnnnnnnnnnnnnnnnnnnnnnnnnnnnnnnnnnnnnnnnnnnnnnnnnnnnnnnnnnnnnnnnnnnnnnnnnnnnnnnnnnnnnnnnnnnnnnnnnnnnnnnnnnnnnnnnnnnnnnnnnnnnnnnnnnnnnnnnnnnnnnnnnnnnnnnnnnnnnnnnnnnnnnnnnnnnngggaggggtggggagagaagagaaaaggcaggaaaaaccaaaaccaaccaaccaaattcccaaacaccagaaacacggaatctctttggcaagatcactgtgatttctgactcagtgacatatgtgttctctgtgaggtcattaacctgctattattttgactactggttaatttcagaactcactaaatatgtatcttagggttcagtaagttctaaaaacccttttgagggtttcttaaaaaacatattgtcttttcaaacataatagaataatatagtaattttttttgttctcaatccttttggtaattatcaaggtagttattgagtttatttcatttacatttctctccttttgcttattttgccaaaatatccagatggcatagtttatgtacaaatactattttttatttctaaaagattctcagcccgtcatctcatgtagcctaggttaaccttgaacttgctatatagaagaaactggtcttgaactcctaatttacctcatcatctccccagtgttgaatttacaagtatgtgacaccacctacattttgaaatcactatatatatgtatatgtgtatatatatatatatatatatgaaaaatatatacatactacacacacacacatatcagaagtaaaatgccacagattaaggcaagagggtcaatggggactattctggttgtaagcagggcagtctctcaggtgttcctagtgatctggtagtaaagtttcagatccatcaagatgaattaccaaaagtagaatacaacacaacaatttatcccagtatccccgtccccagaatcccttgtttctggcccttcagcctccagggctacccagacaaattacagggacctctgcctcagctttcttctcatgcactttggcttgtccatcacttcttctaccaccacactctcaaggcgctggagtttcaaggaagacggccctggggctgagagagcatctcttctaattttattttctaggacctctgtgcggtcttgtggtttcctgtaggctgtatttctgccgcggcggcggttaacacggtcctctgtgctgtgcgttacattccccaatcgatgattagttctaaatcattggttctcaatgagggtaattttgttttctgggacatcttcgacagtatctaaagacattttcattgctcacaactgagaaatgaaattgacatctcctgctcagacctgaggctactgctcactattgctacaaatcatagaagacccaataatgaaagattatccagattaaaatgtcagcagtctggggtcgagagcctattgattaaatgtaggcttatttttggcctgcttctggtgttaggagctattgactaatgctcatgttcgttactttgttaagggcttacaaaaaaatgtactattcctgcctttccataaagacatcttcccttcatcggtcacccgattagcctgagctatagtccatatagtaacacatagtaaatgcttggcattaatgaatgattcttcctggaggagccgggacccagggtaatgttgggggaaacattggaaaaaaaaaaaaaaaaaaaaaaacccagcaggtcccgcatttgcgcctgtttttatcttgtggagactctgactcaaaactcctcagtctttctgcccaattcgctaggttctcactggtgggttggtaccacgtcaaccgcgtgcttcaaatcccccacggcctttgtggcgcacatctggcaaacccacgctttgccactgtatcttttgaacccagacgagctgctgcgtgaaggaaaacgcaacacaaacttagttcagaaacaacggtaactcaatctctgggcacaacaactaaaacctaatcttgtaagccttattaaaatctgattcctcggatggagaatccttgcggatctgccaagataccggaaaccctagcagctacaagttatcctcttccaaaaaggccctccctccctcttgcttcctctcttcctctctccaacccggaagccctacctacttggcccagtgattggctcctttattctttaggtaattggtttacaagaacagctgcggcccatccaccacagggtaggatttggaccttctgtgagaagcacctgtccatactgtctgtcaggtgtatgtgacttttgcctggggcctctttaaccctcttgctttaacttatattaaaatatctttattaaactccaactctgcttcataacaacatccagtattttccagtcctctactagcctgtaacttttaaaaagtttactttatttgtgtgtgtgtgagagagtgtgtatgtgtgtgtgtatgtgtgtccatcggatctacaggtaattgagtgattgatgtaggtactgggaaccaaatctgggccccccagtgagcagtgcatgttaatagccatcatccctccagccccggtaacattttatatttcgttccaggttgatctcctatcaagagtttttggcatttgaatctgttctatgtgctccagattccatgttcatagtggctttccaactgtttgacaagagcggaaatggagaggtgacatttggtaaggggaaacaaaaaagattataagtaataagtaaagttcccagtgctggtccagttcttcactcccagatacagttactgagtgtatgttgtttgtttaggacctactcagtgagtgaagtaggaatttccaaaagtggtttatacaagtaaaagtggtgtcacattcttcagcgtgttaggggagtgaatttattggtgatgttgctccagctctttcaagcactcagacttggatgtgctaaggagtggactgagtgcttttcattgaagcccacgtgaagcaaaagcacacccagcaagcttgtcccttcattctaaagggctttgttttactttagctttgaatagggagtttggagtttctccatggtaccttgggaatattgctactctgctgttttctatccactgggaggcagggatggtggagtttccccaatgtcccctttagagccttggttttagggaacaaagcctagagaatagaatggtcttccgaggtggatgcaaaaattgacttaaagtcttctgtaggagacttgtctctcccgagtatacaaactagaattttccgttcctttctttccctttatttcttcagctatcattcatctttaaagacgatcattggtagaaattagtttatcttaataaaagtgttggttaatcttttctttagcagcatttcagtaaaaaacaatgtagtgttttcaaagacttagagccctcttttctgcctgttctctttcttttaaaaattgaaagcagtttttattatgaataaaaacaaataacataaaactttacatccttgtaattttcaaatagtcagctcagccaaactccgaggtttactttccagaacttctcatcctccatgagtaaagttgacccccttttatggtgtgaattggcacaaatatttgtaaagaaaaccttgacattcagactttctctaaaccacagcactgttcattctctctgattcgttaattataatagaagtgtcactcatttacatataggaggcaggtagagctctgagagttcgaggccagcctggtctagttccaggacagccagggctacatagagaaaccttgtcctaaaaaaaaaaaacgaaaaccataaaggaagcaacttcaccataattgtcagaactgagaacatataggtctgtcagaaggaccagttgcatcttgcctgtgatttggtgggcacattgtctcctttggcattcccctttctcttcattggctcaacccttctctgtgaagaacactttcccctaaaaataccctgcagaggtctttacattttggcatatagctgggcatcctccctgctttgcagcaagctctggccattttgcttcctgaagaatgttgacttggtacaaatacacccagaactatagagaaagcacagggtctctaactccgagtgagtgatagtgctgagcggtctccttgcagtaggtagcacacgtgcacacacagctctcttgcaaacgtggcacagtgatgttggggaactggacaggagaatttgagttaatggcagtgtccccgagcttacgtcatgtgcacatcaacatcaagagttaggttcctcagccaggtggtggtggcacactcctttaaccccagcagaggcaggtggatctccatgaattcgaggtccacttggtcttcagtttcaggactggatggccaaggctacacagagaaaccctgtctcaagaaacgaaaaaaacaagaattaggtttctcaaaatcaatttctaatttatgttgtcagccgccttagcgttgtgtccctccctccatttggttgctttccccaattcgtgtatgtgccttttaagtgtcaccaaagacacttcattcaacagaccatcaacagattcctgtcactattgattaggagatgaaatgaacatggaaagcagctgagcagctggcacacaccttacttcatggagataaaagctcatggctagcacagcctacccttattattttagggctcttttgtttgttttcccccttaaattatgatttataagttagggttttaagaaatatagtcaggatgaaaaaatagtttgaacttttagtagcacctaccataatctgaaggacatatgaaccccctgcctcagagacttactttctttttttctgtccattatatgaagataagattattgtggaggggctggcgagatggctcagtagttaagagcaccgactgctcttctaaaggtgccgagttcaaatcccagcaaccacatggtagctcacaaccatccgtaatgtaatctgatgccctcttctggagtgtctgaagacagctacagtgtacttacatataataaataaataaatcttaaaaaagaaaatgattattgtggaataactagaagttccagggtctttgccctgtgacttctggttccctcttccccccatttctcctttctctctcccttgatctcatttataggactttaatcatttcctcttcctgtctacccctagttttgaggatccacttttagataatatttctctctctctctttttttttcttttccttctttttctttttctttgtgtgtttgggtgtgattctggattctgggagttgaacccagggtctcatgacttctagataagctttctgccactgagatcaagccccgccttaggccagctttctcaaccaatctgaacgcagtgataagaatctgatttacatctttgagaaaacaagcatcaaaattgttgtgttcagccaatgccatgtaataagattatcccaagtctccagcttttctgtgtaaagaaataatcaacttgaagtgtattttttataggatttgtgggtctgtgatgaaggtcagtttgtatccgtttaataaaatgaatcattcttatatattttgagacacatgtttagggaaaagaaatttggtattcactttaactagagttaaaccctttgcacccaatggccttgcatttcctagttggagctgtttaaggtacagttttctctgtgcacacgagggaaagtaaggagccatattggatgcaaactgcaacggagtgtaggccagtcacacgttgctgttgctgtggtctttggactctgacaacagtgttggtgttatctatgtgtttgttcattctttttgcatccttttgttttagatgtgctttttatgcacatcaagctgtatatttaagctgtagcatcatagcaactatttatatttatatacataacagcatcaaaccttgatttgagtgccagacaaggcgtttttgttgctgttgtcagacaggcctccattctgcagagaggacttacatttcagaatgaaagctcaggaaaggattctggagttctgtttttttttttttcctttcttttttaaataaataaataaataaagatttagttaatattttttctttgataatctttaataaacttttaatgcatgctgtgggtaattacttaatggcttgtatctctgttactgccagatggcctgagccttgtggagcccgttgcatgtgctggatacagtgtccatgtgccgtgtctcactgttacccactagtgtcctggtatcctgctgggtagaattaggtagcggtaacctgatccctgtcaagtggtaatactgcatcctgctgtcatatgttgccttgcattgatcttaaaaacttttaaagaaggtatttattgctctaacacagattggattctaaaatcaatgaacataatcagaagaaactcttacttgtttactaataaacatatataaaacatgctatctgctctagaatttctattaaactcttgtgcacattgcactccaatggatttcctaggaccggaaactggtccccctgagctttcccaaggacacacccatactgcacaagccttctaaatcaggaatgcctttgatacagtactgtgttgtccaggttgtacagggtacagcaagtaaaaaatgtattctgcacttgccttttaagtggactcccttctaaggggaagccataacaacagttgttattccaagtgtcaggacatggtagtacatgtgccttttctctgtggagaataactatagacgtggatagtgtgagagtctagtggccatagactatgatcatttggtgtgcaatagaggcacacgggtatttgattaaatcaggaagaaaatttaagatgctttgtattgctttccggcatcataaaggaccattttgaataaaatacacaaggctactaaagtagcttagagtttgacattaaagggggagtattggcaagggtgttatgccacgtgatagtagactgttagggcttgtagcttctgtgatgttctttaactatgaactcatctttcctgagaaatgaacctttatgtatatttggcagcaggactcctctatttgactgatcacacagtaatcccttctggaggtaggtaaagggttaacacttcccctacagagtgcctggggagttcacctaggatactaattccttcctggaagtagaggggaagtagaggcggaagctgagggagtctgcatgctgaggccggttggtcgggacttcctccaccacttcccggtgttgatcttttctgttgttacattgttgctgtttgttttcttttctgggctcctagttgttcctcctctttcctcccaatttctcctgcactgaaaagcacatccacacgtgtcactgtcctgtcttttccgttgtacactgtaaggatagtcaccacttaccccaggtatccaaagggccattcttgacttcaccctaagaactatgcaggtgaaaccaagctgtttgaggaaaaaaaaaaattcccttggcaataaagactgctccgtctcaagcctttaagttggaagcagcggctcctgctggaatccttgaagtcagatgtcaagctgggctgatggtaggcgggctgtgtcacggggctgatggcttgtatacctacaggaggagttctctggccacagcgttggtacagcagctccttcaaggctcagtcacggagcgggcacggtggcaggcttggagaagagtgccagccccggtcagaggtaattttgtactgcagaaaggtgctgaagaccttgcaggaagcgtccctaagaaccaggggagggataagggggggcatgagatggggagacacagtgggggttgccggggaatcagaaacctctgttaagacatatttacataatatgcttcaatgtgtatttcacctagtccagtcttcataagtgactggtacagctaaactgactaatagactttttttttttcggggggggggggaagcatttttacgttatcacattctcacctttacctgctctccagacaaatcacgcgctcctctccttttgagcaaagagaacataatggcaagctacttttgttatctggccccaattcccccttcaaaggaattataaagctcatttttccctaagcccatgttctctgcaggaagtgaaaaaatggtctattgtttttcctctgtcagaaacatgaatggacttcctgtttcttccagtagtgccaacctagtgtagcctcctgggtcatgatcttgctgccaagatgtgctagtcacgccgggccagaactgtggcctcagaaatagtactaatacagagtgctgtttagggctaaagatccttgtgtgccactggaagatgggattttcttggggtgggaaacttgatacacagagagatggatcagggatgctcagggttcatggtggtctcccctctcaggtcatgcaagactcaggaagataagggcagcagctgatggagccattgcctcgtgcaggaatacgcttcttggttctaggacttttacatcgttggtttttgttaacacatcccaggggcagaatagtggctactataaattaagtctccagtagttcactaaatcgtctctgtgacattcctgagccagcttcaggcgacagtaatagaatagggacagattggagatgacatttcacgaggtgctggataggttcacagtcttattagccctagtcactttagttgagcctggggtgttacaaaaaaaaaaaaaaggactgaaagtgtgatggagtggttactcaacggggatgacgtcaccatgaaaccatacacagagctgtcagggggaacatttggggagaagtagaaaatgtccgagtacaatttgagaaaaatgctacttctgtatttgagagcctgctatgactaatttagatcattatcttaatggctcgcgaacagcgtctaagttctgagacggctaggaagttagtaagaaagaacttcccatttaagtttttattacagggctcgttcagctccgtgatggagtgcttgcttagcattggcggggcatagggttgattgttagcccactttaatgaggtgtttttatctataaggattgttttcaaatatgcattataagtctagtttgtgagcctagtatggtagctcatgcctgtaatcccggccatgaggctgtgaaggaggaggattgccaagagttcaaggccatactgggtgacagacagtatgaggccctatttcaaataacaaaaccaagccaaacaaaattatgctaggccggatagtgtcagcctataatctcaggtacttggcagctgaggcaggaggattgtaaattcgaagccttcttgggcttcaaagtaagttcaggcccagcctaggcaacccagaccctgtctcaaaaaagaaggtggggggggggggggcagtgctacaggtagcataaagcagacagcagtagcaggaagcttacctagcatgctcaaggccctaggttcaatacccaataccacaaataaatacacagataaataaacaaataaacaaatacaatttagtaaatatccttttggtaatgtcagaaaaaaaagttgaagccattgaattttgtttgtttgaagggttctgagtctttgaggctgttttgcacttaagattctgatagtttctttcttttttaaaaagatttatttatttattatatatgagtacaccgtcactgtcttcagacccaccagaagagggcatcggatcccattacagatggttgtgagccaccatgtggttgctgggaattgaactcaggacctctggaagagcagtcagtgctcttaaccactgagccatctctccagcccagaatctaatattttcaaaacatataaaagggatccagttttaactgctgttacataaaatcatgcagatagctttcttctccttttgttttagagatagcatcatgctaagtaaactcagacctgctatgcagcagtagatacattgcatattaaataattgaacgttctgagttacaacttttaaaactaaaagctactgtgaaatagcttcctttctttagccaccttagcataacttcatatttgcaatgacttattcttattctgcatttcattgcattttttaatcttttaagtacctttttgttagacttgttttgtatttgggacatggtcacaccttgtagctctggctgacttggcactctttatgtaaaccaggctgaccgtcagttgacagagatcctcctgcctctgccacccaaatgctgggattaaaggccagcattaccatgtctggttggtttgacttccaaaataagcaaacttaggttcttttgagaatagagtgattaattatattagatggctcctaaaaatattcatattaattaattaattatattagatggctcctaaaaatattcatattagcaccccatattctaaactttttacaatacttactattttaattaatttataagctttaatatatttacaacctgaaactttatttacatcccccttcatccctcttgagtagaggatgatggggattagatccatgatctcgtatatgacaggcaagcattctacacaggctacattcccagaccccagcttcaaggatggtcttttgtcttggtttgaaccagaatctcatgaatcgatattgaagtcttttcagaatagaaaccccatgcaatgtttagcttatgtttatttaagatgaatatacttgacaaaggttgaaaactctgagatcttgttgctacttagctaagaaatcttgcatccattgagagagaagatgagaatcccgtctccccagtgacattaggagtagttccgcccaaatgcagcattttcattaagaaaaagaggtacataaaacaaagagaatccattactccattgccagttctgagactagcgttgtattcaaagactgtcaaaatcagagaaaacaacatagttagaggcaattgtaaaacatcaagcctatgtttactaattctctaggataattgatagctattgatggtaaaactcttacactaataaaattggcttaaattggaaaataatttagttaaaacattactaaaaaggctcctgctttcttaactttgctagtgatttgggggggggggcatgagcttctaaattagactacccagtctatgcttgttaaagtaccagtcatttgtgaaccaattttcataataagaaaactgtaagaaagtgaatgatctcgctggtgcatgaagacaagcaacggagttctggttgtatcttacagcgtgactggtacctaatgagaagttagcatgccgtggatggttcttcattgacaagtggatcactaatttcacttatcttaaaacatttttaatagttcagactaataatcatggattttagggggatttcaaggctttgtggcaagaccctatttttgacactatcagcttttaataaggtgctttactgccgagctaatgatacgctgttggtagtatttcttatagctatcttcaatagtcatattcaggctagtgtgaatgtaataatcatgcctcaatcaaaccatacttagtatgacaaatattgcattatactgtaatttaggtattcacgcttctgataaaaggcttaattcgactccttgaggaaccagggaaacactattgattttatgctggaatgtaaagtagcagctatttatattgcaagatagaaatcgcttcctaattaaaattaaatcaagagaaattaagaatctcatggccttatatgtagcagtatacaatcttaagtgaaaaattatactttgtatcagttgtgctcctgcatgggtttctgggcacaaagagatttgcagttcctcttggtagaagcagccggtcttgactttttaaacgtttctcaagtctcctctgtaggagcattgcagtggattggatgattcattgatcagcaggactgattcggttttcttttcccttttaagaaaatgtcaaggagatttttgggcagactattatccatcaccacatcccttttaactgggactgcgagttcatccggctgcactttgggcacaaccgcaagaagcacctgaactatgtggaattcactcagttcctccaggtaggcgcccttctgggcactggcattgtctagtacagagatggaggaagtccccatctcacccccattcttcattcccctctcatggaagcaagctctttaaactcatgcagccattttctttcagcctgtacgtgcattcatgtaagtagtcagcttatattatcccttcttaatttttctgcttaaagaaaaatgttggttgagttctaactacgtgagattcggagttcttttgcctctcacggccaagcacagtctcggatattttccaccttcaacctttctataattatgtcacaagtttatttagatcaatagtcataggattgactgtaatttcatagatacaaagccctccatacctatgggctttgcatctatggaaccaagaaactacagatagaaaatacttagaaaaaaagttgcatctacgttgaacatgtagaaactttttttcttgtcataattccttgaacaataaagtataattcatttacatagtattcacactgcattagtgggtttttgttttgtttttcttttccttttctgagatagagtttctctgtgtagccctggctgtcctggaactcactctgtagaccaggctggcctcaaactcagagatctgcctgcctctgcctcccaagtgtagaggtagattaaaagtgtatgtcactccctcccagcagctttaagtattataagtagtatagagattatttcacatctataggaggggctggtgagatggaccagcgggtaaaggcagatgccagcaagcttggtaacctgagcttgatatattaaagtcatgtagtggaaggtgagaactgaatctcgcaagctgtcctctgacctcccatgtataccaggatgcacacacacacacacatgcatacagagaggggggaaatatactaaacagtaaatgcaaaaatgtaggatgtgcacaggctatgtggaagagatggtttaaagtatatggggaaacatgagtaggctctctgtaaatagtgacccaagggacacctctaattgatgactagaattattgatttgtttaggatgtccagggtttgtttatttttctacttagtgatgttaactcttccagtcgtttctcttattattaaagtctccttcgtgcatttaaagtccagcccgttatttgcccgtgcccgttgatttcctatcagtggcactctccaggagtctcccatctcagcaaagatcgagggccaggtgtatgactctgcctggtatacatgctatcctagtataacagtggattaaaaaaaataggggacaggaaggataaattttcatataacatataaagctaatcctttagtagtaggcagtttacaggcttttggcacagtaatggcattttgcaacctttatctatcccagatgtcttcataaagaaaagcctggtctgttttaggagttgttcccatcaacacttctccagcttctgggtactacgaatctgctgtttgtttttatggatgtacctagtgcagacatacgaatgaggttgtatgacaggatgttttgtgcgtctctttcctccacttaacataatatttaaaataactatccttattaggtcaaattccagcactcaggaggcagagacaggcagacttctcgagttcgagacaagcctggtctacacagagagttctacttcagccagggatacatacataatcagaccctgtttcaagaaagaattagcaatattgggaatggggttatagctcagtggaagagcacttgcctgtgtaagtgaatccctaggttcaatccatacagaacaaccaccaggcctttagctgggtataattgttcacacttgtagtttttgcctttaggaggctgaggcaggggaataggaattcaaacaagcatttggatcacacgtgggccatatgagaagaccttgtctcaaggaccaaacaaacagaataacaaaagaaccacccacatctgatcatgtggtgacacccctttattgctctttttgacttaatattcattgcatgactatatttttgtccactcatgagttgttctgaccttctggtgcttgtttataggagctcctacaaacatcacatgcaaatatttgttagatgacccattttcaattctcttgtgtatttgcatagggatagaattgcagtcttacagtcttctattacctccccttgtggtcctctgttcgttccttcccctttgtggtgatgggcgtagcacccaggacctcatgcatgttagataagtgctctcattgagctgtgtcccagcccctttgcctggcattctgttttctagagcagcaacaacaggaaatggtgcctttagggtctgaaagcgaagctgagctactctttgattgtggtcacctccagcctgaagagcccatttgcccttctggtacactacacctctcctggtccctggatttcatctttcctaaataacaattttcttctttttgatggaatgtttcctgtattggctctctgagaaaagtataataattttgagacttctcttgtgtttaaaagcttccatcattaaattagatagtttgactgggtattggcttttatggtgttccttgtgtgctttctgctttgtagtgtggactttaagaatcctattgccattctcattgcagatttttcttgcattctggggtttttaggattctccaccccactaccactaccaccaccgccaccaccacccctctccttaccaatggttggtttcttgactggttgtttccaggtcttgatcaagaaattgaaataagggcatccacagatgcagtctcaaagaagccctgctcaggagcagggtgacacagtacggatagcacacatgagagcacgtggagcagggcgacacagtacagacagcacacatgagaacacgtggagcagggtgacacagtacagacagcacacatgagaacacgtgggagcacacagaagtgagcagaattgaaaatgggtcatctaacaacatcgccacagaggggttgtggcctcaggttattgcctagggcttcttttatagaggaagaaaggaaggaaggaagaaaggaaggaaagaagaaagaaagggaggaaagaaggaaggaaggaggaacttgttactaaagggtataacatggatagttctcttcttcagttgacaaatttgaattatataacctttattgcccataatctttcccataatgcaactgattttaatcataagcatacccaagtatagagaggggtaagatggtcagtctgagggccagcaagatggctcagtgggtaaaagcacttgccaccaagtctgattaactgagttcaatttttttttttttttttttttgtctttttgagacannnnnnnnnnnnnnnnnnnnttttgagacagggtttctctgtatagccctggctgtcctggaactcactctgtagaccaggctggccttgaacttagaaatccgcctgcctctgcctcccgagtgctggggttaaaagagtgcgccaccacgcccggctctcagttcaatttttaggacccataagatagaaagagagaaccaattactataaactgtcctttgacattcacatccatgctatggtatgcccctccacccccatttttataaagtaataattttttttcctggtgctggtattttatttctttgtgtacattaggctatgaattcgtatggaatgggctccaacagctcaggctcttttccgttagtcctcacaaagtgtgcttctctgggtggcacaggctggcgcttcacctgcacccaggtgcccttctctttggcttcctttttcttctggtcgttctccttcacccgcttcaggaagctgttctttgagtgcttgatgtgctcaatccgcacattgatcctcttggccagaattttgcccttaacctacttgttgacaatgatgcccacggcatgctgggtgacattgtagactcttccggttttgctgtggtagcacttatggggcattcctttttgaacagtgcccattcccttgatgtctacaatatcacccttcttgtagattcgcatatatgtggccaaaggaacaatgccatgtttcctaaaaggcctagagaacatgtaccgggtgcctctcctctttccctttgtgttcgtcattttggtgagttactggaagatggctgcggcggccgaaaaagcaagtaataaatttttaattgaaaaagaattaaacatggtaaatagaggatttttcttaaacgctcacttgccttgctgcccatgtacccaaaatgggttcatatgggagtggctctccccaccttcctaccaaatatgactggaaaggcatttgaacagaaacaatccatgtttgatactatcagggaaagaggggtgtttccattatttgaagtaggaagcaggtacagcgagatgcaggtgggcatcctgggctactcacaagttgccaggcgcattgttaggcaatgtgttcatgacccatgccaagtagatctattccttatgctttcctgccatgcctacatgatgatatgtattcatgtgaactttcttttaatcattttgctgggcattcagtaggatctcataaggaaacttcaattcttgaagttactttcctcttctgcatttcttttagttttcaccctattttccttctggcttactaaattaaaaaaaaaaattttgggggggggggtgtttcaagacagggtttctctgtatagccctggctgtcctggaactcactctatagaccaggctggcctcaaactcagaaatccacctgcctctgcctctcgagtgctgggattaaaggcgttcgccaccacgcccagctttaaattaatgtttgttatgttttgaaatctttaagagctctcttggttttctgaatatttactctacctatttatttgtttgttttaatggcatttcttagtgtggtaatgtagtctgtgagttgaggcagagagaaaattccaaattggagtttagcttgggatacactttaagactttgtcttaaataagtaaataaataggtagcaaaaaaaaaaaaaaagagcagaaaaatagcatactgttcctattagagtgttacactgtctcccccacatcttcaatgatattaaagacagggctttcagtttcatttccttcagagtatgtttgctataagtttcattttttttttctccttccatttcttctttctgtttgcttttttttaaaaaaaggtttatttcttacatatatgttcctgtgtctgtccatgtgcaccgtgtgtatatagatgtccttataggactagaaaaggacattgactcccctcctggaactggagctacaggtggtctaagccacccagagtgggttctgggttctgggaactgaacatgggtcccctgcacgggcaataagcactctgaactcatgagtcagctctccagcctctttctggttttgttgcctttgtcccttgagtgcttacccacccagcttccaggttttctccttgtctgggtctctgtttttcatagtagggctttttagggtctgatggccctttgttcatacttaagattaggacttactgaacactatgggtttatggtggtcagttttgttacctttccattgctgtgacaaaatactatgaccaagccatggaacatatagaaaaaagcatttaatttggcttacggtttcagagggttagagtccatgatggcagaacaaaggcctagtggcagcaacagctgagagctcacatcttgattcataagcaggaagcagagataactcaatatggcactttgaaacctcaaagccctcccccagtggcacacctcctccatcaaggccacaccccctaagactccccaaatagctaccaaccagagttcaagtaattgtgaacctcttttttacactaccaggataggatttattaacgttagacctggcagtacaatgctgtggtaaggccattttgttggagccctggggcgcctctgtgttaaaggcctttggattagtgaatgagatcatctgctctatttaagaactggttacctgggctgaggagatgcctcagcatgtacagtgcttgctgcataaggacgagaatcagttcagtccccaacactcacactaaaaacggtgggtgggcatgtttacatgatgggatacctgtaatcacatggctgtgtggggcagaggcaggaggacacctggacttgagagctgctgtcctggctttgggttcagtgagagcgcttatctgaaggggaacaagggaacaaataagatgaaaagtagtacaaaagnnnnnnnnnnnnnnnnnnnnnnnnnnnnnnnnnnnnnnnnnnnnnnnnnnnnnnnnnnnnnnnnnnnnnnnnnnnnnnnnnnnnnnnnnnnnnnnnnnnnnnnnnnnnnnnnnnnnnnnnnnnnnnnnnnnnnnnnnnnnnnnnnnnnnnnnnnnnnnnnnnnnnnnnnnnnnnnnnnnnnnnnnnnnnnnnnnnnnnnnnnnnnnnnnnnnnnnnnnnnnnnnnnnnnnnnnnnnnnnnnnnnnnnnnnnnnnnnnnnnnnnnnnnnnnnnnnnnnnnnnnnnnnnnnnnnnnnnnnnnnnnnnnnnnacacaccatacacacacacacacagtaccacacacacaccataccacacacacacacacacacacacacacacacaccacacataacacacacacacacacacacacacacacatcacatcacataccacatacacacatacacacacacacacacacatacacacaccacacataccacacacacacacacatcacatacatcacataccacatacacacacacacacacacacacacacacacacacacacacaccccacataccacacataccacatacacacacgaagcagttacctgtctaccccatcagctattagcctagtctctctgccttttacaaactctggcagaaaacttagaggttgcttgtctagagggtttaacagaggaacccgaggctggtggaagttggtgcagaacacaaccctgaatgagggaaataaacttaaatccacgtctgtagcaactgtccatagcccccagctctattccctaccccgcaaccacactataaaaactccaagtctcttatttaaagtctcagtcaaggctagctttgaacttctcatccttcaacccccacctctggaattaaatgttgtgcttataggttttgcatttccaatgggatcccagcctttatttgattctcatatcagatatgccttgagggctcataccacctctgtagagccatctggagctcttgacccactgaaagatttagaaggcttgatagacttgtctttagctcatcatcctgctaagaattattcgaaaatctattacgaaatctcacacacatacagaaaaccacataaaacaaatggatagcatagtgaattataaaacaaatgtttgctaagttaattttaatgacttgaattactattgagatatcagaagtccatgggaaatataattaaagccagatgtggtggttgcatgcctgtaattctagtacttgggagctgaaggcagaagaatcaggaattcaaggctagctttggctacacagagtttaaagtgaacctggactacatgagtgagaccctgggttttttttttttttaagatatacatacatatgtaaaaaaataaataaaagggatgagacttcaacaaaaaattatttcatctatctgtctatatgtccatccatccacttgtggattgaacctaggcctgtgtatgacacataagcattctaccaacgagtcccccagccccctaaagtactttaaatgtcaggaaaaggtaagccattactgtggtgaatggatgcaatgagaatattccatcttacctttggctaatctttaaatgtgactagagttcgcagctgcatggggcatgaacgtggcatgtgaatacacagcatgtgttgtgccagcccatccttttggattacatcacaggtgcccaagacagaaatgctctgatttacacttgggtatcataccccagggtacattttactatttttattgatatcacttgttacaacaattgattttacagcagtttaaaaccttggcgagtttctggactgctttacagctggagagtgactgtccccaaagcctgacagactgataatgaacacagcttatagagtttcctgtccctaactttcattttagaattaggaagcgttgtgtttggcatttggtagagtttcacgattcgttctttttttttctttatttggaaaaaaagagtggtgtctgatgcactgactggttctgattgcaacatttaaaatgaaaaaactgaagctgaacataaactcttaattcaggaagctctcatggacagcaagtcttcaagctggagagagtaaatcactgtattgtagcggctggaagcaggcagtaaacgcgctgactgctttgttttcagtcacggaaatggtccaagtaaaatcaggaggccccctttccctctccttcagtaactgacagttctgatccattctctttccccaaggactaccatgtgtcacatctgtcagcctcatgaacaaatcagacgcttccttgtgaattcagagcctcagaacgggtcctcaggatgtgctccgtgtaaacgcggtttctctcttctccctgcaggaattgcaattggaacacgcaaggcaagcctttgcactgaaagacaagagcaaaagcggcatgatctcgggtctggatttcagtgacgtcatggtcaccatccggtcccacatgctcactccttttgtggaggagaacctggtctcagtaagtaagaagacagagttcactttccacctcctgtgcagtttgtgaaccaccgggttctggaacaccttcttggctcttaagcagccaggcttcgtgtttaggtgttagaaggttaaactgtgtgactctgtgtgtgtgtgtgtgtgtgtgtgtgtgtgtgtaaggtgagtggtctttcctcaggttttagcttcatccagagctatcatcctgctctcatatacttccatttactatgtcccagtccgagggacatgggagttcgtagacaagagtcagcgatctctgtgtttccgtgcagtcttgctttcatcttggcttctgtcacctcccgccccaagctctggcagtctagctaccatggctccttcctctgtgtgcgttgggatactcactggcctctgtacatttaataactgtgttccatgtcagaaaacacggaggaaatgtggggccatcagcccctagagttgtccccctctgccctttcacctgtgcactcagagcatctataccagacacaggtcttttgttctgtcagagagcaaatctctctcagataatcatgtggacccacagcaaactcatgccacccgcttcctcacacagtggtgaaactctcctcacctgctttcttgtccgcacactgtgttgtgggtaagtttttgattactgcttgttttgaatggaggaaagccagtgggtacgtgtgttgtttcagctgaagaccattatccgtgacttacactggggtagaaagatcaacgcctggtctttctcttcagtgaatttgaacgtggagcatgtcactctcccctccacatctcacccctgccccatctcacccctgcccctgcctgcttctgcaccttcacctcatacctcaaccaaagatgaaaggagggacggaaaaggaatcagggagagaaggagagaagggaagaaaatccagagagaaggactcacacagagtcagtcaggatggagggatccgttttgtatttttccaactgggttagatggctgttgcttcggtttaccaaaatcccatcataatcctcagaggtaaaattaaggcataggatggagtcttgcctttggtagccagattgccattagtaaaaataaaatctatatggggagggaagacacttttcattatagaaggtggaagcatttagatgtcaaagagaaaccagaaaaatcacaccgtttgtaatggtctcttttgtctggggttggtaccttagtatttctattagcgtttctctgagttttgaatagtgacagttctgcatcccctttgccttataacacaggaattagacttttggaaactgaaaagcacaaacaggcaaacaaaaacaacactaaatctttctctttagaggctatacctaagtgaatggcaaagcgaggcccttccttctcagtctccacagataatggaggaaggtcgcttgcctgttacccagtgtgagtggccctgatgtgtggtaaacctaatagagagtgaaccctccccagatcttctaacatttggggagctttggggagttgtgttttgcacgatgcaggatcagagagctgcacataggtatcttaaatataacaattttttttttttttagttaagaaaagttgatgtaataaaacggtctcagggctggagagatggctcagccgttaagagcactgattgctcttccagaggacttgggttcaattcccagcaacaacatggtggctcacaaccatgcataactccagttccagggatctgacacccttctcagttttctctagcaccagacacacctgtggtatactacatacatgtggtcaaaataccagtatacatagaataaaataatcaactttaaatggccttaaaatgtaaggctcctcggtggtagagtgcatggtagaagaggccttggtttcaatctacagcatggaaaaaatagagttagtgcttggtttttgtgtatgtgcataggaaaaaaataaaccagtttagggaatattccttattacacactgatgtttttccaggggcggcaggcattgaatagttgagggtcttgaagaatcctgtttaaatagccaggttttgatctggaataattatatttgttgtttctgaccttagtgatgggtgagccatgaactccaacttccagatgttactttcttccttaaaacctacattgcgtaacctcccctaagggtacaaagtgcactgtgttttagtcagatagcccccttgtatttaagggctggtagctaattgttttaatgacagagactccttcgggtccactttgagaaaaaaaaaaaaaaaaaaaaagcagagtccaaaccactgtttctttcttttgagttttaaaattttttttgtgttgttatttcctaggctgccggagggggtacctcacaccaagttagcttctcctacttcaacgcatttaactccttactcaacaacatggagcttgttcgaaagatctatagcactttagcaggcacgaggaaagatattgaagtcaccaagggtaagcttttaaaagtcaattggaatcctcgagtccatgcttttgatcagacagatagaccaatgtttgttcttcatcagatagatgtgaggcccgccacagaacaaggggatcaggaaagtcagttgtcatttgcatgtgcgtctttgacgcatgcgcaagcttcctgtaggcctggaagcccaggtgcagtgtttaatgagatactgaggtcaggaatgcaaaagtgcttttgacagttttgaaaagagcctttggcccgatctgtcaaacaggtcagtggcggtggcagtggcagtggcagtgtggcggcagcttgtttgtactgaaaatgagttgccagagttgtctgccgtggagagaggagcaaggccactgcttttgggtgagtggtggcagggcatcttgggacctcagagcagcctcctttatcttttaactctggggaccagggggagtgagcaagagaagcaagaactagagaggctctgttttgatgttgaggttgacctgtttctgcaatttcatcctcttaacatttattttatccccagctttccagaatgcagttataggctggatctgagcatttaaatttagttttatatgttttagaatagtgctaaaatctctctccccgaatttatattagactcttgaaatactttgccaggcagtggtggcgcatgccttaaatcctagcactgggaggcagaggcaggcagatttctgagttcaaggccagcctggtctacagagtgagttccaggacagccagggctacacagagagaaaccctgtctggaaaaaacaaaaacaaaaaaagaaaagaaaagactaacatttgtttctttgtcttccagaggaatttgcccagagcgccatacgctatggacaggtcactcctctagaaattgatatcttgtaccagcttgcagacctatataatgcctcagggtaagacttccagtgattctttatggtttagtacaaggtggatcttttgagatgtgacatattcatgtcctttaccaactgccttgtcaatgtatagattaatttttttaatttatttatttgccttacgtttcaatatccaccccctctccttccagtctcccttcccatagaccctccccctatcccccctctgagaagggggaggcttccctgggtatccccctaccctggcacatcaagtctctgcaggactaggtgcatcctctcctactgaggctaggcaaggcagcccaagttagagggatgggatccacaaataggccacagattcggggacagtccccccctccagtttttgggggacccacataaagaccaaggtgcacatctgctacgtatgtgcagggtggcttaggtccagcccatgctggctctttggttggtggttcagtctctgggagcccccaagggtccaagtttgttgactttgtttgccttcctgtggagtccctgtcctcttcaggtccctcagtctttctcccaactcttccacaagacttcctgaatgccatctaatgtttgattatgggtctctgcatttgttccattggctgataggtggagcctcttggaggacagctatgttcagatcctgtctgcaagcatagcagaatatcattaatagtggcagggattggttcttggccatggagggtctcaatttgggccagtcattggttggtcattccctctgtctctgctccatctttgtccatgaacatcttgtaggcagaatgaaggttttggtctaaggttttgtggatgggttggtgtccttattcctcctgaaagtcttgcatggctacagaaggtggccactttgggctcccccactgctaggaatctcaggtagagtcacccccataaactccctgcccaccccccaggcctctggcacatcctagagatttcctcttctcatcccatgctctccctaacctgccccctgcccctaccctcattctccccattctcttactcacccaggtccctggtccctccctccatccacctctgatgtctattttatttccccttctgagaaagattcaagcatcctcccttgggccctccttgttatttagcttctttgggtctgtggattgtagcgtgtttatcctggacctcatgtctaatgtccacttataagtgagtacataccatgcatgtcctttgtggtggtacacctctaattccagcactcaagacgctgaggtaaccaagcttctgtgagttcaaggtcatcctgctccacataggaagttgcaggacagccaaggctacagtgtctgtgtcacaaaaaaaacaaaacaaaacaaaaaaaccaaaaaacaaaaaaaaaacccaaaaacaaaaaaaaagcaaatacaaaaagaaaagaaagaattaaaataaataagctttgtctttagtatataattcttagcaagagaaactggaggagagagaagatggagggctagagaggcagagggagggagagagagggagagccgggggcagaagcaaagacagaatggattggagcaaagagccaagagatgaatggtatgtgtgtgtgtgtgtgtgtgtgtgtgtgtgtgtgtgtgtgtgtgagagagagagagagagagagagagagacagagacagagacagagagagacagagacagaggcagagagacagagagagacagagagagagagagagacagaggcagagagagagagagagaaggggttcagagtgagagtgaagagggagaaggtgcaaaatgagaagcggctgaggtacatggaagaaccttgtatactttttgatcaccgtaaagggttgtttttctgaatcgtgtgtacccaatttgtgttggagaatattactttcttaaaatatacctaatatatcatcatgcttcccccagagacaagctcggatgtttatgcctttgttacaagttaaaaacacaaaagtatgtagaaggcatttaacatgcaaatatatgcaaacgaatgcagagccctcatgcacaagagcccagtggactgggctgtttaaaaacctgggtggttgttgtttccagtcacctgtggtagttctttaaataataatatcagatatactgggcctgaagagctggatctacagtcccagacacttgctccttttgcaaaggactcaggtttgatcccagcatccacactgggtggtgcatacctgcttggaacttcagctccagaaggtcaagactctctggtggctccagaggtgcactcacaagcacataccctcacctgttcatacatacaaatacacataattaaaaataatttttaagtctctgaggcctgcaggagttggatattcgtgtgtgtcttcttgccttcatgccatatggtgcactgctgggcagatgatgtatagtctctcagctgccttgggcaccagcgtttgggtaattgacacaaactaccaagccatgtctcaaccatctaannnnnnnnnnnnnnnnnnnnaagttgcaggacagccagagctacagtgtctgtgtcccaaaaaaaaaaaaaaaaaaaaaaaaagcaaatacaaaaagaaaagaaagaattaaaataaataagctttgtctttagtgtatagattcttagcaagagaaactggaggagagagaagatggagggctagagaggcagagggagggagagagagggagagccgggggcagaagcaaagacagaatggattggagcaaagagccaagagatgaatggggtgtgtgtgtgtgtgtgtgagagagagagagagagagagagagagagagagagagaaggggttcagagtgagagtgaagagggagaaggtgcaaaatgagaagcagagagttagggagagggaaaagatggacttatgcaggctttcccggtggtctgaatttaaggagatttatagaaacttggttaagtttgtaaattcatttaaataggctgaggtacatggaagaacattgtatactttttgatcaccgtaaagggttgtttttctgaatcgtgtgtacccaatttgtgttggagaatattactttcttaaaatatacctaatatatcatcatgcttctcccagagacaagctctgatgtttatgcctttgttacaagttaaaaacacaaaagtatgtagaaggcatttaacatgcaaatatatgcaaacgaatgcagagccctcatgcacaagagcccagtggactgggctgtttaaaaacctgggtggttgttgtttccagtcacctgtggtagttctttaaataataatatcagatatactgggcctgaagagctggatctgccgtcccagacacttgctccttttgcaaaggactcaggtttgatcccagcatccacactgggtggtgcatacctgcttggaacttcagctccagaaggtcaagactctctggtggctccagaggtgcactcacaagcacataccctcacctgttcatacatacaaatacacataattaaaaataatttctaagtctctgagnnnnnnnnnnnnnnnnnnnnnnnnnnnnnnnnnnnnnnnnnnnnnnnnnnnnnnnnnnnnnnnnnnnnnnnnnnnnnnnnnnnnnnnnnnnnnnnnnnnnnnnnnnnnnnnnnnnnnnnnnnnnnnnnnnnnnnnnnnnnnnnnnnnnnnnnnnnnnnnnnnnnnnnnnnnnnnnnnnnnnnnnnnnnnnnnnnnnnnnnnnnnnnnnnnnnnnnnnnnnnnnnnnnnnnnnnnnnnnnnnnnnnnnnnnnnnnnnnnnnnnnnnnnnnnnnnnnnnnnnnnnnnnnnnnnnnnnnnnnnnnnnnnnnnnnnnnnnnnnnnnnnnnnnnnnnnnnnnnnnnnnnnnnnnnnnnnnnnnnnnnnnnnnnnnnnnnnnnnnnnnnnnnnnnnnnnnnnnnnnnnnnnnnnnnnnnnnnnnnnnnnnnnnnnnnnnnnnnnnnnnnnnnnnnnnnnnnnnnnnnnnnnnnnnnnnnnnnnnnnnnnnnnnnnnnnnnnnnnnnnnnnnnnnnnnnnnnnnnnnnnnnnnnnnnnnnnnnnnnnnnnnnnnnnnnnnnnnnnnnnnnnnnnnnnnnnnnnnnnnnnnnnnnnnnnnnnnnnnnnnnnnnnnnnnnnnnnnnnnnnnnnnnnnnnnnnnnnnnnnnnnnnnnnnnnnnnnnnnnnnnnnnnnnnnnnnnnnnnnnnnnnnnnnnnnnnnnnnnnnnnnnnnnnnnnnnnnnnnnnnnnnnnnnnnnnnnnnnnnnnnnnnnnnnnnnnnnnnnnnnnnnnnnnnnnnnnnnnnnnnnnnnnnnnnnnnnnnnnnnnnnnnnnnnnnnnnnnnnnnnnnnnnnnnnnnnnnnnnnnnnnnnnnnnnnnnnnnnnnnnnnnnnnnnnnnnnnnnnnnnnnnnnnnnnnnnnnnnnnnnnnnnnnnnnnnnnnnnnnnnnnnnnnnnnnnnnnnnnnnnnnnnnnnnnnnnnnnnnnnnnnnnnnnnnnnnnnnnnnnnnnnnnnnnnnnnnnnnnnnnnnnnnnnnnnnnnnnnnnnnnnnnnnnnnnnnnnnnnnnnnnnnnnnnnnnnnnnnnnnnnnnnnnnnnnnnnnnnnnnnnnnnnnnnnnnnnnnnnnnnnnnnnnnnnnnnnnnnnnnnnnnnnnnnnnnnnnnnncacttcccaattgaaacaaactatcagtgtgattgtgcctaatagaattacaaggtggaaaaagaaaacgtatctgattagtaaaccagacagaaaatttgttttcctttaatgttaattataataaaaatgaggcccatgtcttgtaatacagctccattttggattttctaaatgttttcagtaaaaaaagccagacccatgagatgacctccaagaccgaatggaaccatttaaaaaaaaacaaaaaaaaagaagccttgttttaagtggaaacctgaacatgtggcagaggatcacagggtcttgtggggtttgaggtttcggggagctggcctcttcctcctgatgtcccattgggcttggccttgaaatacctctctttctcattgttcattatgaggttttgtgaggtactgggagatggggagagaaagtggagaacggaggacggagaccagtggggcctacggggcagcctgccaaagcgtatgtatctgcctttccttgtgggacttcttggttagcagccttgggtgggcttgctggcactctcctttgttagtcaggtgagtgagaaatcaaagctctcagccagtatggcgatgagcaccggcaacctagcactcaggaagctgaggcagaaagagggccacgagttcaaggccagcctgagctacatggcaagattgtgactccaaaaaccaatcaaccaaccagccatttggaaaggtctgctaggaggtatttcttctgcttgagctccatagaattgctttctgaaatcaattaggatttccagttccaccttaataataaataatattttactcagttgaagcaaaggaaaaatgcaaaagagccctttggccccttcacttgtggccatgctttgtctacacatggaagattactggtttctgtcatgcacagtggtttagctttttggtttccccttgccccaattttttgctttctgttacctaagtttctcttctcttctcctctcctccctctcttcccctcccctcccctctctccctctccnnnnnnnnnnnnnnnnnnnnttctctctctctctcttgttttgttatttgagacaggataatcatgtagtccaggctagcctcaaagtttatttctattgtaagttcttagtccttaaaaaagatgggtttattcaaatttggtttttttttttttttttttaataaaaatttgtaacataaaaactcgagccaggcagtggtaacgcacacctttaatcccagcacttgggaggcagaggcagtcgaatttctgagtttgaggccagcctggtctacagagtgagttccaagatagccagggctacacagagaaaccctgtctcgaaaaactaaccaaccaaccaaacaaacaaaaaacctcaagtcatttgaagacattgacatatttaatgatttcttaccaaattgaactttgtattttgtactgtgcattcctaaaaatcactcttgagttttgaaaaacttaattgtgaaaagatactgtgcaatgttatgtctctattatatctgccgttggagatgttgttcatatctgttactggggctggggaaaaactcagtagtagaatgtttgtgcaatgtctgtgagaccctgattcacagacaccacaaaaataaacaagcatgcacacacttgcaactgagaaacagttcatttagcttcttccaagtaagtcagcgtccgcagggtggcttagtgtattagtcagggtcctctcgagcagcggctctcaacctgtgggagccttctctatcgttctcctccttactatctgagagagggtctttcctaaacctagagcttgtagtctgagctaggctggctggggggctgaggatgaagggagacaggaggatacctggtatgtgaaaaatcattgccattgtcactaacatagacaagctgctctgtgtctgtttaaatatggccttgttggagtattgacactcccccccgacccccgcaagaccattggaaaacacaggtatctatattatgattcatactagtagcaaaattacagctatgaagtagcagtaaaaataatgttatggttgggggttacatgaagaactgtatgaaaggggcacagctaagtttgatccgagtttgattcttagaactcacttggtagaaggacagaactgattcctggaagatgtcctgtggcctctgggtttgcatggtgtcatgtacatacacacacacacacacacacacacacacacacacacaccataaaaaataaacaacaaaaaagccattcacatgaatgaaattaaaagtcccaactcatgtactctgacttctacgaataaattaagttaaaatttaaaaattctcttttaaaaaaaaaaaatcctacttcagcagctggacacattccaggatgcccatcatctcagcaccaggaggctaaggagaatggtgctcagcctgaggccggctggactgggctgctcagcaggaccctacttcaaaccaagagtcttcatttcctctctggccccatttctgatgctcatttccctcttgcccaccattcttgtttctagcagttttccagaggccagatctgtgactcacagctaagaaggtgatatagttacaggagtgacttttctttagacaggacggcttgcctatgtagtggcaatgccaagctcccaatggagcacagagactttcagataccaggatcctcctgtctccctcctcccccctcctcccagcccccagccagtctagctcagacgacaagctgtaggtttaggaaagaccctctctcagatggtaaggtagaaacccgtagagaaggacacctgatgccaacctctggcctccacatgacctcacgcaataataacaactttggtcacgagtcttagttttgccttttgttgaagagagaaatgcatacctttatcgttctcctgagtgtagtctttactgatcgtgagtgcgagtgtgggagatagctcagcaggtacaaagcacctactgtcaaagcctgacaacccgagtttggtccccagaccccacttaaaagtggaaagaaagaactgaccaagtagttctctgacatctacatgtgagacaggggtatgtgtgcacccaagcatcacacaccaccaccaccaccacctccacctccaccaacagtgtcttagttaaggtttctatttctgtgaagatacaccatggccaccacaatccctagaaaggaaagcatttagttggagctggcttggtttcagaggtttaattcattattatcatggcaggaatcatggccacatagttagacatggtgctggagaagaagctgtgagttctccattttaattcacgtgcagcagaaggaaattcctggccacactgggcatggcttgagcccacccccatggtgacatacttcattcaacaaggtcacacctactccaaccaagccacatctcctaatagtgccactctttatgggccaaacattcaaacacgtgaatctgtgggggccatttctattcaaatccctatgaacagtaaataaaatttaaaagcagatatccaagaatgcttgcattagcattaagcagtggaaacacctcagacatttactgagaggagcaagggatgcacgaatatgatgtgtggtgaaaaaaaatgatttttcccccctgcctgtgacagggtcctattatgttatacaggctaacctttgactcatagtcctcctgcctcagcctcccaggtgctgggatgaaaacgtggtgtgcttgactatcccatctagacaacagtaacttttcggggtgtggcaacaaagtgtaatcttcatacatggtggatgggtgaatctggcaaaagccagccttggcttcacagcagatttgaggttggcttggattacataacatagtatctcaaaatggaaataaggaaagagaaatgtgtaaaagagtcagaggaaatgaggactcttagtttgaaatagggtccttctgagcggtgcaggcaggcctccttagcctcctggtgctgggatgatgggcttcctggactgtgtccagctgctgaagtgggaatagaaaggctgagggaaagagaagagagagattggaggtttcttttgagttcttagggttgaaccttggcctcctgcatactaggcaagtaccccaagctatatttgcagctcaaaaaaaaaaaaaaaaaaaaagaaccctgtcccaccactactagccctgaactcactttgtagcaaaggttggttttgaacttggatccttctgcttccatctcctgagggctggggttacagctatgtacttctacccctgttttatgagtgctggggactgaacccagggttcatgccagccaagcattgtactgactgagctatgttcacacttccccaaaaggaagttgtaacttgaagaaaccaagttaggtgaaagttaacaaaggactgcagagaaaaagatttgcacatttttaatgcttgtaccagtttggaggttaagcccagattatgaatattggcaaatgatccttctttttttttctggtgtcccacgtttactttttcttttcttttctttttttttaaataaagactttttattttatgtatatgagtacactgtagttgtacagatggctgtgagccttcatgtggttgttgggaattgaatttaggacctctctttgctctggcccaaagatttatttattattataaataagtacaatgtagctgccttcagacgcaccagaagagagtgtcagatctcattatgggtggttgggagccaccatgtggttcctgagatttgaactcaggacctttggaagggcagtcagtgctcttacccgctgagccatcttgccagccccccttgtttacattttcagctgtatgaggtagctgatctgttatgaaccttctcaggcatagctctgtgtgtgttgtgtttctgtgagacagtctattaaagctctaggccatctgctcaaaatgtgctccaccttaacattccccgctaggatgactgcatctttctttcacacatgctgttccttaggctggggactttgtctctctgtgtagtttgtagtctcttggatgacccttgatcttgtattcatgaatacacggaggacaacattacagtttactggcaagcttcacaaaagtgaaacctgttctcaaaaaggaggaaatcaggtttatatgaaagctattatttatttacaagtcatttatctcattaaacattttaggtcagaagataactgcaatctttaatgcatctgaactcctacatattgggaggaaagtgtgcatacattgttttatgtatagaaataagaaaataataaaatttgtatctttttccctgtacccacttggtccttctgtactgtcatagctttgggttttaatcttactttgaaaagctaacagtggggcctggaaagccacaggcgtggctcagagcggcttcccgagccctgccttgctcctctgagcatacagatgatgtagaacccagctttgctgttctcagacacttgctggaaaattgacttcagatattcctgttctcccaaattgttatgtgttgttggcagaagctttctccccactgggttgacatgctacgtgaagcagctcggtgtaggcttggttccttagctgacacaatcccattctacgtttaacacaaacaaacaaataaatgaataaataataaataaataacaaacctcagttcaaatgaaatctcacattcttgagggagccagttaaaagcatttaaggatctcaacttcattctgcttggaaaaccacttaattagcctcattaactatcagccatacccttatcaggttaaccttatcaggctaacttattaaccgtatcgggtcccaaccttaagggagaagtgcctttgcccttgggcctctttgctcacagtaggtgattgtcagacctgaatattttcctttagcctaaatgctaaaaactcagtgcatagtcattatagggatgacagttctagggacactgcacttatgaatattcatgatgtgaaacctatagcattaattacattaatttgcatagctgactacaagggaatcataagttgtaatgataactaagccttaagaaggaacatcccggtaaccctatacaggtatgttttcttacaaatgctgtttaatgggaatgaaggtgacatttctgtcaaaaggcattcgggtatttatagttcgaggtgttgttgtagctaagagttaaagcacagaataatccttcagttttcataggattttgcagggcttataaacattctttgaagaaagagagttgaaagaaaaatctgtattagtgaatgaaggagaaacctcccatgtgaataagagaattcgtggtcccttgatggctctttggatcagagacctattattttacgaaaagaacctttgtgtgtgtgtgtgtgtgtgtgtgtgtgtgtgtgtgtgtaagatcgggtttagctttggatccaatgtctgtttgccttaagtttactttttaaaatttttatttttattttatgtttatgggtgttttgcctgtctgtgtgtgtgtctgtatgtgtatgtgtgtgtgtgtgtgtgtgtgtgagtgtgagtgtgtgtaaacatgcatgcagcttgtggaggccacaaaagaacactcctggaaattgagtattaggtcactgtgagccaccacgtgggtgctggggactgaagctgagtcctctggagaagcagccagtcctaaccatttagccatctctcagcccttggctttgaactcttgacctactggcttctgcctcctgagtaggttccattacaggtgtgcaccaccatgcttagctttagtctagatattttaattcaactttgttttcttgagataaaagtccctgtaacccagatgggccttgaatttaccgtgtaactgaggatgcccttgaacttgtgaaactccctccgttcccttagagctagaattcatgtctggctcgccatgtccagataatagctttattattatttttagttgtgtcaattattactctgtgtgtgtgtgtgtgtgtgtgtgtgtgtgtgtgtgtgtgtgtacaggtgcacatgtgtggagctcagaggacacctttcaggagtaacttctctcctttcaccgtgaattctggggatcaaattcaggtcttcagacatgcacagcatgcactttagctactgaactacctcaccagccatcactgccacctcctcctcctcttcccccttttcctcttcctcctcctgctcttcttcattttgaaaagttcattttaacaaagtaggtattttactcctttgttccaatctgcttatagagcatatcagatatttccataccgaaagtacttagttctggactggcacattcatgtagacgggtcactccaggcgcaggactgtgggacagcatctgatctgcaaccagatttatttcaatgttttattttactagtatcagattttgttagaactgtgaatatggacaggacaatagttcgagattttagacgtgatcagtcttctctggtccggaactcacagagatctgtctacctctgtctcttgagtgttgagactaaaggtttcctcagcgcacagacaattttgatatatttctaaaagcaagacgttttgatatgggcagtgcatgcctgtgatcccgacacttgagaatcagaaggatcagtaatttaagaatatcctcagccagatagcgatttcaaggccaggctaggatctgagactttgtcacacacacacacacacacacacacacacacacacacacacacacacactaaaggattggtgacatggctcatcttgtaaaggcacttgccaccaaacctgacaccctaagtttgatcctcataacctgcacggtggaaaacactgattgcagaaagttgtctcctgtcctccacatgtgagctatgactacatatacctccctacctcagtgcacatacagtgaatgagtgagtgattgaatgttaaaaacagcaaaatatttaaaaaaatgttaacttgaagaggagcaaatgttatatgctggcacatttgcttacttaagagttttgtttctgggagggcttgaaatgggtctcagtgatacagggcttgtccagctcccataggccggtgttcaatccccagtactgcaaaagcaagcataccaacacaaacctttcaaggataataatgtatcctccacaacagtccatatgtgaaaattagggaaaaactactctatgttttgctgggtacgttgttactgctttttttttttaatctattttatgcttttgcgtgtgtggagggcatatatatctgtgtaccacatgcaaacttagtgcttttggagggcagaagagggcattgaatcctctggaactgaacttacaggtaatagtgcaccaccatgaggatgctgggagcccaaacagggtcctctgcaagagcagtcagtgctcttaatttctgggtcatttctctccagccctggggtgtttctcttttaaaaacaaacaaacaaagaaacaaacaataaaaccccactgttttctttcaggtttagactttctttctttttttttttttttttttttttgtagttgcaaaacacattttcagacttttctattttcttcttccccctcagcaatctcctggcttgggcagacctatctggctccagattgccgagtctgcatacaggttcactctgggctcagttgctggaggtgagtggaatatctgtggctgcttcaggctggttttgctgtaacattatcccagcagatgggacagctcagcaaaggtgcagttcactgttcctgggggtcaggactgtgaggctttcagaagattctttatttctacctgtgatcagagggcttgtcatagcatggctgcggccctctggctccagcctgtcttgagcgtaaaacctctgtaataatgggagagtctggagtgcactgctgtactccccctctgtaatcacatcaggtaaggccagcgtgaaaaatggagatgagaaaactgagtgtatggggtcaggctaggggcagggtagaagccaagatctgagatgcaaactgagaaactcataaaataaaacaaaaatccacagagaatcacagcgtctggcttgtgatttttctttcctttttctggcttaagagtatccagatatgttgtttatttgctaaaaagaatccctcctcccctctctgctcatagagagtcagtccattaaaaagctttctatttgtgtgtgtgtgtgtgtgtgtgtgtgtgtgtgtgtgcgcgcacgcgcgcacacgggtcacttcgggcatgttaagatcagagggcaacttggccagagttggctctctccttccacggtgtggggtccagggattaaactcaggttgtcacacttgatgacaagcacctttgcctgctgagccacctcatcagcctgagactatttttacttaaattatctacagagaaaatgtatagaacttgaaatcacttagttgagaagaacctccaaaaatatttaaacactcctgagttttcaaaactagctggaactggtgcccagtaattttttttttcagcctcagttttagaaggtgccaagaacatactgctttcagcagccaaaaaatagaacactctaagtcctgtgaattacttcagttcccaaggaattctctagcatgactttaggcttttgtttgattgactttcaaccaaattctatacatggggataggatcgtgtcaaggactcctcccccaaaggatgggtgttgcttagatttgccaaaatgcttcagtgaattaaactttaaaatcacaacctcttagcttccttagcgtcacttcatagttgtgaagaaggagcaggtgaaatatttaggcgtttaatagaaaatgtaaagaagtgatacaggtggactgtggttgcacatgcctgtaatcccagcagaggtgggctcatctctgtgagttcaaggccaggatggcctacagagtgggttctaggagagctggggccagagaaaccctgtctagaaaaagaaaccaacaaacaaaacaaacaaaagaaagagaaagaaagaataaagagaaatggtatccatacataattgttttatgtcacttaatgaaactgagagctggtgttctaaggttggttggcaatgatttgaaactcactctcttaactcacacataagacatcaaagattttttttttttggacatgctaggtaaacactctaccactgattgttgtcccttaagcagacccggttgcttgccattccaccatcttttggctctactaataagagaaggaaacctgtaaataagatgagagccttccgtgagactagatgctgtgttctatgtttcgcctatggagatgagatctgatgcctcagggacgctccatctaattgtgttcttttgttaaacctaaaaattgttctatttgtagctgtgggggccactgcggtgtaccccatagacctggtgaagacccggatgcaaaaccagcgtggtacgggctctgtggtcggggagctgatgtataaaaacagcttcgactgttttaagaaagtgttgcgctacgagggtttctttggactgtaccgaggtgagtacgcgcagctcagccgccgacgttggtgatttttttgtgtcaccatcagcagattttaactcactcgttataaagactgataagggcagtttcttttccttcccgcccctccttttgctccttttcctgtgttgtgttctttctggtgactagcaatattagtcagtaaacaggcgttcctttctccttcctactgctttgaattcttgggctccaaatcctgcgcctctcctaccatgtgtttttgagcatgctctttgagggcacggcgctcagagagcccctctgctccgagaggtagaagagagctatatgtgttgacaccaattccctttataaatccaagacaggtgctacttgaaggtgaatttaccctgtctatctacacttgtttcagtgagaagaaatgtcgattaaaaaaatattttatttttgccttttcctaggagacccgtaataagtcttttcccgttaagtcatgtggttttttaaaagacaggagaatcctaggcccccaagcttcagctggctcaggcagagcacaaagttcctctctcttctcgcagttagagcgcctgactgtcgcatcctagactgctgccctgtgcaaaattctccccggccccaaaaggctttgtaggaacttgtcttcttggagagagggctcctttcatctccatgttttctcgttagaatttcgggttcctttgcgggggagattaattttttaatccctttgggcgccacttggaattctttgaaatacgcttagcgtgttctggtcccaagcatttatgtaatttactgtatgtgtttgtttgcattcccaggcttattaatccccccgctcattctgagctctgtcgaactgtttggcttagaactgttcctaggaaagagagatgcattggataaatgggcgggagaagaaacactgtagttggtatcatattcaggcgtttgagtggacacatttagagtcaaagaataccttttgcgcttttgctgtggatactgtgtatagagtaaataggcccaaatgccctgcttctgagagagaatataatgaagtttcctcacatattcaaaaacgctttggctctgaaaaatccaggttgtgtaacttttgtattacaggggcaagagtggccactgcctggagtgtctggggctggcaatgcagagccttgttttaaatggactcagctcttctaactagatcttatttaaagggggggatcatgggagagtggcactaaggttgcttatttctttgccatctctaatctttcattattgaataatgacctttctcttaattagtatggttttaagttacaaaggatatctacaaagaaccatcaggaggaatctggctatgctgtgtacagccttctcaatagataggtacttctagatttttgtttgggagagctctcatattaattaaatgggtgaaatatagcaagcaggggaagatgctgttgactttatgcaggatctaagctgataaaacgggtcctttaaatgagagacttttgtattagagagatgattgtaggaaccctgcctgggagcacagtgattgttgagactgtcatatattgcatagaactggcccattattctgtcagatgattgacaaagttgttgacagattagctaaatttctttgcaggcaacaatgataaaatgacagaaatcagtactttattaacattccacaagctttagggaggaaagttgtaaaacaaatacacaggctgacacgggtgttccggagctagattcaaagaaatagggtctgatgatcaggaaggcaagaaagttaagactgccatctgctgatttattctctgagaccagtctgcggcccgggaaaggtgtgtgcagatttgtttgataattccgtttgactgacagcagcctgaatgcacgattacttgctggctcccaactcccggaaaatcactcatcagcatcctccaaagaggcttaagatgagagcagcaagcaagctctcagacacacatagtactccccctggactgcttggttttaaggctgtaagctgtgtttattgctagcatctttagaaagaaatgtatgcaaaaaagaaagctctagaaatctgagctccgtgggtatctacagaggtagttgtttacatatgactgactgttcttttccagtttgcagccagcctggaaaatgtagctttctaagcataatgatttcttttgttttgaagagtctttttaaatgccttaagcttgatacatattagaaaataaaaatgtaattggcacatattttcataggaactgatattaaaagctgcattttttttttcagtttaggctttcttttaaataaatgagtgccatgcaaaatgttgggcttctctgaagagaagataatgggagcagatactcagtagcatcggcgctcctttgtgctgcaaggagtgtacactgtagcaaaacctggctggcttaaagcacactgccctgagcttctcttagcccacagcactggcttctgtggagtgtctgtgtgctagtatgctgctgttgggaataggagaaaatttggttaccgaatggacaaaacccacatgctctgttctttcattgtgtacttttatggagatgttagataatgaatctgtttgtttgtttgtttgtttgtttgtttgtttttaaggatattaaagaaaagaaaaacatttttagcttggagaaaaaaatgacattatatttgactggcaaattttacgtacacacacacacacacaacacacacaacaacacacaccacacacgaatttttagaataacccccccttcccccattaagatgaaaaccttgagatacttggtgggtaactttgagaaaaagacttccttgttgggcttgtacttccacatacagacatctggtttgcaaatgattctctccttctctgcaggtctgatcccacagctgataggggttgcaccagaaaaagccattaagctaacagtaagtttctttgttgctgaactgatgtcatttatatagatcgtcttgaagccagaaataagaccaatgctggtgagactggagtgctatcaaggcgtgtgtaaaaattttcacatatatatagacaattggtaaaattgtatttttattttgctaatttggagataaaatggtgaccagcagaggaaatgtgcagaaattctgatgagctgatcttgtcttcctaattaggttaatgattttgtccgggacaaatttaccaaaagagatggctctatcccactgccggcggaaatccttgctggaggttgcgtatgtatcaatatgggtgtctcttgtagcaaaattattcctttaacctttctgcaaagtaggcatgaaatatgagtaacatttccctttaaatttttttattgcattgtgtgtgtgtgtgtgtgtgtgtgtgtgttgcattatgatatggtggccagagataaactttcaggagctgggtctttccttccattctgttgggattttggttctttccttttatcctgtttgtccagggcattgaatttagggagtaggcacctttacccactggtccaacatcttcctttaactcaaaggactgcctttgagggatgttttagaatgagtgtatgctatgtatggacaaccttggtgtcagcctcaagaaaactatccacctcctttgagacagaatcgcttatccacttgaagctcagcaattaggcctgactggctgaacatggactctggggatcttctgggctccaccctcaccatcactgggattcccaagacagtcaccacatgtggctttatgtggcttgtggggattgccagctaactgatcctcctccctagtacataatctgattctgagtattattttcaccacatttgtttgttttaagcttctgaagctctatcatctagaatatatatatatatatatatacacacacacgtgtgtatacatatatgtatatataatatatgtaattttatttatttagtatagaatagagtttattcaggacatggggaggggagttaagagagtagcagaggcagagaaggcagagaggaaagaatggagaagtggaggccggttctggccacatggagagacgtgggagaaggggatggagtgcaagggggcaggaggcaagaaagaggcaagaacataagagcaatatatgtaattttaaagtgttctgttttgcttgtgcacgtggaagtgcactgggtacatctatgtgccgttggtggacagaaggaggtttcagatcccctggaactggagttatagatgtttgtgagccaccatgtgagtgctggaacctgagtcctttataagagcaacaagtgctcttagcagctgagccagttctccagccccccttctagactttttttaattcctaagtttgtttgtttaagtatcaaaggaaatgtaatagcaggtgtagttcctgtccattgctcttctctgaaactgtaaagttaattgggcccttcagttttatgtgtagctatgagtgtgccattgcatttccataagcctttttatgaggctgcaaggaacacaaagagactataagtatattgtagcaattggcaaaaattccaaagccagaggctgagattgtgatttttgtagagctcggaggcttctgtttttaaggtgtaagcattacattggatttagactggctgacacatctaagcttgcagctcagcaaatgttccgtgcaatatctgtttcacagttgataaagtggtttgcctgaggctttcgtagtccattttggtcctgaaaacgttaatgatttctagttggattagctggaggtcttcacaaaaaccttctcacttgcttatggagcctgagacgatgaggtcaatgacctgagaagttttaattcagagaagatgtccctggggtcagaggagcaattgctccaggcttctctgtcatgatgcgtgtcagctggacccttgccttgtgtggggggaaggccaggcttgtgtgtttgcttgtacatcatgggtgggtgtgctttctcatggaggagacttatttggctcaatttattttttatgaatgataaatgatagacagaagtaaagcccttgcttacatgtgtctacaaaagtctactcctctctcatattgtaactagatgctgtgattgtttcacttttgtgtaaacgagaaatatattggtggttttagtttccatttggctaggaagcttcctaactcatgctgaccacagcatatgcatacctgtgatctcctgaaagctgagcatcttttgtcgtggagaggattgtaatgcgtgcctgtgactcccagaccagggtggctaacctaggagaatcagaatttcagggtcatctttggctacatctgggtttgaggctagcccgggctaaatgaggccttatctgggaaaagaaaaagaaacaagaaggttgtacattttgttttccaaacagctaattatttctgtgctgtgtagaggattttggtcataaactggcctgttctcttatctgacctgtgacctaagtggttaagcaagaatcagaaactggattcctttgctctttctaggtgtggattcttgtttataggtgaagtctaagatgtcctgagggtttggctaacactgaatttatcccttaatcatgttttacttatggatgattaatggccgatttttgattggctgatagtaggagaaatagcgatgttgaactctgggcaaagaggaaagaaaatgtggcagtggcatttttatcttttcttttttttctgacagtcttactctgtagcccaggctggccttaacctcatgatgctacttctttagcctcctggagaccaggattacaggcttataccacttacaaagctctttttttttttttttttttttctgttgatgagccgtcataccacagggtagatgattgttaaagcctagcctagcacttctctcaaaagtcagttaactaaaccagagaataaagtcttagatgagtggccaggcctctgtttctagaccagcaggcaccgtgggacagaggacaaactcttcccttgagtgaagccaatcaacagtgtggaaagcaatttcactgggctttgaaaatgagtccacgcccctattggtactgatcagaccggatgtatagtgtccttcagggcagttagctgagtgctgggctagcatggctgagcaaatcacattgctcttccccagcgcccagtgttaaagcttactaggttagccagcaaggaaggccctaactgagctggaagctcttcccagcaaagggattagtgagcgcccaggccaagcttcttgtagctgggagggaatgctgttgccatgagaacagtggagattccagatctgcagcctgtgttctgctgctctgctttccttggcttttgttttgagatagggcctcagcttgcagccctggctggcctggaactctttatatagaccaggctgccctctagctcctagagatccacctgcctctcccttctggatgcaaggatgggaggagcctccatgcctcgatggtctttttctgtttttaatcggtgtgtgtgtgttatgtaagggctccgatcaagactcaacataccgaagcatgcagtcatcacaagctgccttcttggcactatgatcagtttaccttaaggtttgggtttttttgatatacatttgatatgtatgtgatctgatgtgtgtgtgtgtgtgtgtgtgtgagagagagagagagagcgcagccacagagatgacagtttgccagttctcaccttccaccatgtgggtctcagggcttacagtcaggtcaccaggcctgcctgcagcttcgttacccactgagccttcttgcaggcacaccacagtcagttttcaaacttgtgtggtaaggctgcgtgtggtagcttctaccaatcccaggtctctggaggcagagacaggaggatcacttccagttcaaggccagtcagggttacagtgtgagaccctgcctcacaaaacaaaaaagctacatgcaaacaacaacaacaaaacccaaaccaaccaaaacaacataaaaaaaaaaaaaccctatgttctttatcgattaaaagtaatatacagggaacatccacatgtctaccacccagcctaattaacatgctgcttcaagcaatagagactttcggtcctcaaatgtacattttgtagagattatctcattaatcctaaagagtgaccgcattgtgatctcatctgcaacaactggcaaagacaagattcaaggcgcctctccagatccaccctccctctgcaggaacccgcgcctgttctgtatttcatctgttcactttcctctcagcatttgtcctctggatctttcaggcaaatgtcatggttgattttggggatcaaactcaggacctcgtgcctacagggtgtgtgccctaccagagctgtgcccctggccctaaaaggatagtagctttactgatcccaaagtcaccctctaatgctatattgtatgtgttcgattctgtagctcttagtatatccacagagtacagaccaccagcatcagaatcagtgttagcaaatctcatcactgtgcacaccagcaccaacacacacacacacacacacacacacacacacacacacacacacacacacacacacacacatacacacacgcacgcacgcacgcacgcatgcatgcacgcatacacacacacagagatacttgttagctatcaccttctgtcttcccacctcacccctataccctaggtggccattcattaataaactcctccatagactctacttctgaatttttcctataaatgtaaccatgtggtatataacctctgggctctgccttctttcccatagcatgtttccaagggtcactgatactgtagcatgctcccaggggatttagaagtgtctctttgactgtgtctctcttctggcatttccttttatatgtttaatagccattgtgaatggtcacatggtcagggtatgtgccatttattggctggatctcttatctttgtcacataatttttaagttatctctaataaagtttatcattaaatttattgatttgtgcttggaagtcagaagacttccaggaatcagttttcttcatgtaccatgtgggtcctagagactgaactcacatcagcaggcttggtggcaagtgcctttcccagctactcaacatgccctggtatgttgctttgttttgaaggcctaggtctatagctacccaattccctaggtgaggaagtctgtcttctcctacaagtgtatcttgaatgtctttgagagcagcggaaacagctcccctcttccgtttccaggaatccgtaggatcccaaattcatgctgcaaacttgcatggtcacatacacgcacacgcacatacacacacgcacatacacacacacacacacacacacacacacacacacacacacacacacagagattattgaacatttatgccacacgtaaagtatgattcacctccaatcttagctcattctggctactaagactaaatgccataggctgggtaaccacggaaaattactgctcacaattctgggctgtccaagatgaaggcaccatcagactcattgtgctgatccttgctctctggacctcaggggtgccccgctcctgcaccctcgtgtggaggaaggggacacaagagctgtcttcatcttctgcggcacactaatcccacccacaggggcacagcctttaggacctggtcgctttccaaggtcccaccttcctgggtaatagattccaacctatgaattttcagggtggggagacacatatactcagaccatagtacttccccttatttagtctaagttttgtgttctttttattttgttttatttttttttacttattcactttacattccactcactgtccccctctcagccaccaaggtttgtgttcttaacactttgataatatatcacccaacagtaaacatatactgacctttattcttttaaaattgtcaccactgaggcagaaaaatggcgttggtctataaggcccagtcttttgtctgttcttgagacaactaattctgtgacttttattatgtttttttttttctgattattttcaatgcatacattttgcacacctattcaagtggctgatctggccttacggaaatccaagttttggttttcctcagactcttcgagggaactgtaaggcttccagtgattggccactgtggctggagagaaatggttctaaacaatggagagaagcaacaagagacctggcaccctcagggccagtccccagcctttctgcagacccagctcttggggtgggagtgtgaggacagaagggagaccaggactaatccttagcctcaggtgcaggggaggtcaatggctgagttctagcctttcccagggagagagtgggaggggcgtgatttttatattatgtttctgttgtgtacagttaactctcgttgcaagcaggacgtattctcttatgtgttttcagtgtggttctagaacaaccaaaaggacagatgatactgaaaactcaaagctctaagcttgtcctgctgttagtgtgtctgagaaaaacaagtgccaatctgatgaagagtttagcaattgggggttagaagttatttttggtgagtaaaaatttcaccaaaaatatggcatagagaacggaagtcgcttccttatgagacccagaagtatgtcaaattaggttatacccatttatatctagggatatatctatatctacacacacacacacacacatatatgtatatataaatgaatgggtgttttacctgcatgtgtttatactctacatgagtgcctggtgctaacagagagggcataagaccccctggaactgcagttaaaaatggttgtgagctgtgggtgttgggaatcaaacctgctcttaactcttaagtcatctctccagccctgctccccatcattgtgtgttatgatgatctaatttaagttttagttggttattatctatcacttccaattactatctctattttagttttttttgaatatataaacttttttttttttttttggtttttcgagacagggtttctctgtgtagccctggctgtcctggaactcactttgtagaccaggctggcctcgaactcagaaatccgcctgcctctgcctcccgagtgctgggattaaaggcgtgcgccaccgcgcccagcttatatataaactttttaaggtcttttaatccatagttcctagtaccaactcatttaaaaattcactaaaactgctaaaatgatcaaacttagacaggaggtctggaaagaggccatgccagctctgctatgatccggagcaccgctgatgcatccttggggctgagaactgagtagggcgggtgagtggtgacctcctctccagccgctcactttcccttcacaggatgcagctaatcacgtcttcatcgtaagcccgttcaattttgataatcttaagtaaatttggacataatcataatgaaatatatagcaaatattttaggttcataagtgatttggcatttttaaagccaaatcatagtgctttgtgatataatttttttttcttcactattttcttattgggcatttgattattttctttgggcaatttcagtgctctgagaggctacaaatgatacgttggcacaaacacaggggcatcttctttactgtggaaatgtatgtattaaatgattatatttgatgtaactagagcggtttcccattgggagctgttttgccgtcccataagtcagtcctagcataagagaaacgctgagttaaaggctgtgctggtggcacagtcctcattccacacattcctgtctgccacacccttagaaaacgacagtgcatgttcccagtgtatgtgtctttttaagtgctataaatatccaaagttttgttttatatatatatttacttttgagacagtgtctcattctgtcaccttggttgtcctagaattcactctgtagaccagactggccttgaactcacagagatcctcctgcttctgcctcctaagtgctgaggttaaaagttcaagccactatatccagcctgtgttataaatttgtgcgtgtgtgtgtgtgtgtacatatatgtttgtgtgcattgtagtatatatgcatgtcagtgtgtgtgtgtgtgtgtgtgtttgtgtgtgtgtgtgtgtgtgtacaggatctctcactgaaccttgagctaggctggtgaccaagccccagtgagcctcctgtctctgtctgccacagcctggaggttcagctatacctagcaaagcctggtttttacatgggttctgggcacgtgaacccacgcctttatgcttgcagaccaagatttctcacccactgagcctctccagctccatctaaagctctagacaaattaaaaagtgatcttatcatttctaaatgttacagtgcttctagatttaatttgcctacatagttctagtcctattataaagttttcaaatgtaaaatagttttaaaaacatgagcaaacattattgaactgatagaaattttactccttaaaatccagagaccacatagggataacccaatagatgtgtgcccgactacagtatcactgttcatggttgccttgctcccttgctgggagagccatgttgacagcttgcttctgtgttccagggcgtcctctgggtgctgggatgctcactttcggtgcgcataacagttaatatgtgtactgtgtgtcgttgcctccttttcttggttgtactgttttcatggtgctttagaaggaagcttgcatcttgtacactgaagaatttgggaaacgattggaggagggcaaagcttaggcagctggcagtcctttccaagaagatccgatgagagaaaagcaagtcaagggaagggagctgagggcaggcagaccagatgtgagaactcaccagtgtataaagtatgaaagggcaacccagtggtggacgcacatgcctttgatcccagccaggcagatctcagtgagtttgaggccagcctgaatactaactagtatagccaggactatacagagaaaccctaaccaaccgaacaaccaactaaccaaacaaacaaacaaaaaccaggaaaggactttgtgtttatttcaacataatgtccatttttaacacttaccacctaaaggctgacacgctggtggtggtaaatctgagggattataatgaaactgtacagttcttatcttttttattttaatctgctttagtttagaatataaagcatgttttcccaaagacagtctttgtaaccattgttcaaaaaaagcgatttcagggaaatagtaaacttttcaattggtttggtctttaactccagctacaggagtaattacttggattatcattttaacataatttttcacccagcaatccttttgaaagtattgtttgcttagattgaaacattgaactgcacctgtctgcccgcagagcagcagattataaaagaaagaaacacgggcaaatcaacatgtaaaattgggtcagaatatccttgttgggggacctatgtgctggctggtggtctgtgctgtgtcaagacaaaaggggattagttccctggaggattcaagtccagagaaggaaagggatctagggccaatgtagctttcaaagtcatgagtgcggaagggtcaggatttgagccaaaggtgttgaagactgctatggccccagagtgtttaggagccgactagctgccctttggaagggggtctgggagggtcatgggtgtaggcagatgtggaagaggacagatggaggacctcattgctgtttggacacctgtggaactgctctgcccctcagggctcacgcttcttattttaccggaacatgcgccatggctgttatgactatgatcatgattatatggagaccattacaattatgaatattatacgaatatagttttgattatataatgtaaacagctgcagtttaagacaaaaatgcacaaatgagagttgttcgccttgtagagataatatgtattttatttatttttatatctccgtgatcacgcacacatgcgcatctttatattacacaaaccgaaagaggagctgtagcagttattttaagcatccccccacccccactagttgtcaggtttcagatgtaaatacactctgattatttaaaatcaaacctgatactcactcaccaccgaatgtggcatgtgccacgatctgagggtgtttctggttcctagttctgcctaacgattcttttcccctcgttctgtcttgagatgacactgaagtttctctccccaaattccttccttttgtgtgggtgtcctggtccaggctcagagctctgtgcaggctcaggtacagtgtaagaaccggaggagatccatctctggtaaaggtccttctgtgagcctaaggctgtgctcacttttctgcaagttgctgggctgaatcaatgctctgctgattcccctctcacccagagcccaccctgcacgtcttcatttgcttgtgtttgccaaattgtgtttattgattctgttattttgaatgtgtttgaggttatccttgaaggtcagttctgagaatcggcctcgacatttctaatagaaataaagccaagtctgggcatggtagccctctctcatctgcaacctcagcattctgcaggctgaggcaggagaactgctgtgaagtctagcttagcctggtgaatatagagtgttctaggtgagtttgggctggagattgagtctttgtttcaaatagacatgaacccaaaccgagattagcgtgaagcatctttggaacgtctccatgagcctgtcttacaccgagcgaaatgtgtgcctctcctgcccgagtgaaagagaagtcttccatgcctttcccttcactgacacccctaggccagctctgatgtggaaagaacttgtctgtctcccttgcgtgcaggctggaggctcgcaggtcatctttaccaaccctctggagatagtgaagatccgcctgcaggtagccggagagatcaccacaggaccgagagtcagtgctctgaatgtgcttcaggacctgggacttttcgggctgtacaaggtgggtcagttcctctggctaactgaatggagatgtgacacacagcacacacatgtatacacactatacacacggtatacacctatatacacacactacacacatgtatacacactgtacacacatgtatacacatgtatatacactatacatacagtacacacacgtatacacactgtgcatacagtatacccatgtatacacactgtgcatacatgtgtttacatactgtgtgtactgtacacacatgcagacacacagtacacacatgtagacacacatagtacacatatgtatgcacacagtacacatatgtatacacactgtatacacagtacacacatgtgtacacactgtacacacagcacacatgtataaatacagtacacacatgtatacacactgtacacacagtacacacatgtatacacacagtacacacatgaaagaatgaagaagctagatgaccccaccctcacccccaagctgagacctgtgagacctatcaggaaacccaaatgaaatcgggtcccccaggtaaaggcagcgggatgtacacactgctcctgggtaaaggtggtgggatgaacatgttcctggtgtcatttttagcttttatggagctgctggcaggatatccgttccatagcatctctggcttcatgcttctggcttccactctatggggtctttgagaaatacctttggatactcgttggatggttttaggacaccagaatgatcctatgctcacatagagtctgaatatgtcattgtcccaggaggggcttctcttgtcttagtcatcatgaccatggtggggaaaaaaaagaagatagtagaatttggcagaattcaagtctttaagaagttaagtgggagggtttgtcaataatgaattccattaaaaaacaacaacagttactgtactttcacaaaacgccagtcaacagatttctcccctgccgatatacttaccaccgtcattacagatcagatgtaatggagcagaagccagtatttttctttaactaggagagtatttctttccgttcctttccctggtagaagggaaaatacagaaatttcacctctataggggactgtgtttccacagcattgaatttatttatggatccataactactgaaatgtgtaaatttacctctgtaactgcaaattagaaattagggatgtctagattagagctgtaagccacagggcgctccagagcccggctgccagccgagtctgtctttaccaaatgcctctgctcgctcctcccgcccaccctccctgccatccgttgagattcccttggagagcagaatttgtaaatattggttctatctgtattaccctgttaagagtccttcggtgtttttgttgttgtaataaaaacagagctataggaacccagtgcttgggtatagcatgtgtctgatgaggtaaagcttcagacctgggccgacaggggtcgatggcaatggtatggaaggtcttcctggccctccccagggccaggacaggctgtgttgaatggaacatgcatggaatgagcagggaacacggttgggttttttctctgccttcccaagaacagtttcccttctccattgcctctggctttctgcctggcgtggaactctcgaggcttggaactcgtgattgaggttgacttggtaatttgttagttttggggggtttgggaatcaagtcatttatactgggatctgatcgaatgcctcccctgtttcccctgccactccgatccccactcaagctccctgcccccacgcccggcaaagctgagcaggtcatgcaaacctgggacatccgagagcccttgtgaatcctaaatgctgccttgcttaacattcagaaagttccaattacatattgacaagttgcagagaccggcagtagagcgtcctgagttaatgttgtattttgcttgaaaacacttaagaggatagatctcatgtgtgattacaacagaaaacaagttaattattaaattatttgtcttttttaaaaaatagatttatttatttatttattatttaatgtatgtgagcacactgtagctgtacagatggttgtgaaccttcatgtggttgctgggaattgaatttttaggacctttgcttgctccagtcaaccctgctcactctcgccaactctgatcactcagtccctgctcactccagcccaaagatttatttactattatacataagtacactgtagctgactttagatgcaccagaagagggcatcagatctcattacggtggttgtgagccaccatgtggttgctgggatttgaactcaggacctcagtgctcttacgctgagccatctcgccatcctatttatcattattttatgggcattggtgttttgcctgcatgtctgcctgtgtgagggcgtcaaatccccttggaactggagttaacaaatagttgtgagctaccatgtgggtgctgggaattgaacccagctcctctctccagccctgccacattaagttttaagaccctaaatatagcatttctagaaatgctagaaagttctttgttgttagaatggtgcagccacccggggttagcctggatggatgtccattttcctttagaaagcttcctgccccacatgtttgctctgcctaccccatcccaccccaattcccctcacatcacttctaatgctgtttgaaggacatctgagcctgtcactgatgcctgcccgcttcccatatttacactctgttttgcactgtttcctcaccgcgtgacagggtgccaaagcctgtttcctccgagacattcccttctccgcaatctattttcccgtgtacgctcactgcaaactcctcctggctgatgagaacggacgcgtgggaggcatcaatctcctgacagcgggagccttggcaggtaaccacagatcttcttaaccaaaagaattctgccaagacgcaccaaacctctgacttggagctttatttctggaagttattgttgggatccgacttagctggatataaccgccttttctcctttgtggggatctgattctgatgagcgttaattacatttgcataatgtggataaacaacttaatgcagcttagcaacttggagccaaattagatctgcccatctaaattgggcttccatcattagcatgtgtcttagcctcctgggctcctaaaaccttgggtacagccaactaaggtggagaagtcctttgctagatctgctctgttgggccagtgctgataagcagtctctgcctgcccttaggattgtcctgtagggtagtgcgttcccactctggctcagaagctgagcttcacgaaactctcgcttcttgccaccacaggttagaccaaagcagcaccctgaagccctcaactcctttctcagcgttcagtttggttaatggatgcttaagttgcttaccccctctgcgataggctcagtgcttctggagggtggggcttgcattacgtccttcctgccttccctgtgcggccaacataggagtagaggctcaggcaaaagacaccagattaggcccaggagagtctaccagggggagcagcctggcaggaagaactgactcagcagtagctggggtgaagggggttgaatgcgtgtgtgtccctgtccttccttactcctgagttaccagggaactgacttggaacaacagggagcaaccaggcatccttacattcagcagcacagaggagtgacagcggaaggaaacggttcattaggcttcctcacagctagtaacgaacccacacaaaactcacagactcaggactaggactagactctggtccctgcttggggtttattttagatttatttacatgtgggaggcagagacaggcagagctctgtgagtttgaggtcagccgggtctatatagtgattagttccaggacagccagggctaccttgtctcacaacacaaaaaaccaaaagatttatttacttttatgttcatgtttgcctgcatgtatgtatgtatgtacaccatgtgcatacccgttgctgaatgaggccaaaattgggtatcagataccctggggctggagttatagatggttgcaagccatgaggattctaggaatcaaacttgggtcctctgaaagagcagccagtgctcttaaccactgaggcatctctccaaccccactgcttggctcttaattactgagttatcttctactacttgtcctaagtatggtgtgttaggagccctgggtcctggcagtgttgagatgaatacactgttcttgtttatgacaacagaggacaacttaaaaacaaacaagcaaacaaaccaacaaagaaaaacaagaaaacagggctttgagcccttgtctggggtcctgcaaatgccttggcctccgtcatttgtgagcttggttgaacgaaaacagccagtgatgccggtttaacctggcaccaagtcccccccgccctcgccacccccccccccagctcctttcttgtcctcattagactgttaggaaggggataacggccaggcttccagtgggcaacaaacagaaccacataaacagttaccaagtcacaccagcttatagacattggacctattttcagaaagaggcgagtttttctaattattaccaggcatgcttcgctagcaggtactgagagcatttgaagacctgtcccaggaggcatgcagctcacctgcttccctctgagcagggttctgggctgatccaagggacatactggcatcattctctcacggagcccctcagagcccctcagaaccacaagctccatctgcctagcgatggtgagacagtgagatttgggccaaattgaattccttccccctggggaaggtcatgctgctctctcaaggtctgttttgttttatgaacaaaacctatgcttgagaaatccatcttccgtgtcctgctgctgctgcagcatctcaggtgaccccagggagctgtggcatgtgtgtgttggggaagggtggcctctgaatgatcggttcctctgctgctctttaactggatgcctggccggctctcactgaggttgtaatgactgccacactgactgtcacatgagcaggtctgaaaggaggcttgcagcctctcccttagcacctcagactggcaagtgcttgatgcttttgactcactcaccccacagtgtggttggcaaggatcaaccaagaccacgcacgatgctttgatgccacatgcaatctgtggtgcattaaacagatgtcacaggagaaaatacttgcatcctatttaaagatgaaaagcctaaaggttgttaaggccgggaagggaacgtggcgattcctacctatctctagcagtgcttctctctctccattgttctctgggatggtacattagagacatttccttaattcagaaagaaaaacaaaacctttccaccccaattctactgaaaccagcagccaaccggcaggcttgctgacacttctttccacatgcgcctccgtatctgtgtaaggagctctgagtaccccttgggttacagttgtggactttcttattggatgtatgaagtccttaggaggattaaatgtggctttctcctcaaaggcgtacctgctgcttctctggtgacccctgctgatgtcatcaagacaagactgcaagtggccgccagggccggccagacaacatacagcggggtcgtcgactgtttccgaaagattctccgggaagaagggccctcggcattttggaaagggactgcaggtagatgctggggtggtcctccagcctggctgtctggctgtcctgccctgacactctcaggtcacctcgtaacagcatccaggtgtttagtgtaccctaccctgtctgtcttttccagctcgggtgtttcgatcctcacctcagtttggtgtcactctggttacctacgagcttctgcagcggtggttttacatagattttggaggcctgtaagtacagctacttctcttcacaaagtcaccaaatccacatacgtgtttgttctgtttatagagccactttgggaatgctgagaaatgggacacagtggggttctttaagaccaatgcatggaaagcaatgggctgtaaagctttccacattaagagaggcaaatcactgttagttgaattatttaatatgaccagaaacaacctaagtgtgtactagtcacactcctgtgattgctcctcatcctttttacatttaggagatctcattgcttcccatcacttagtacctagatgttcacacagctagttcacacacccggtttccaagagaggttacccaacgagtcaaccattgtagagtgcaggccccaaactgagctgctccaaatgcagcacacaaaacttcccctggggagacaagcagttgcttgctgagtctgcagggaagttgtacccaaagcaagcgagcaattattaactgttgggcagaagcctgggcactgcgtgtctttatgtcataaccctgtgatcctgccgaaagcctcagtaggggaatagctgctgatccaagtagtggagggaccagcatacggaaaagatgcaaggacagcaattttctcatcccagcgtacaaatactgtgtcttgagagattgtagaagcaagaactaaatttgtttctcttttggtgataagcattatgagcccattattcaagaagctttaaaattaaatcaatacatatacctttacatttcatgtatgcttcctgcataataatagaaaatagaaaaatctacaaatagccagcttcccaaagactattactaatggagtgcattttctcttccgtttatttttctgccctcaagtctgctcataagcagtgggggtggggccgtttgtcttctctatgacgtatgtgaaagcaatgctgtggtgacgctggatatcatgattgatgcaggagacatggagagagctgagagagccttctccatggggtgtggctgtcacagaccccgctcaaagtgtaagccctgagctccctaacggtctgctttttcctgttcacagcaaaccttctggctcagaaccaacgccaaagtcccgcatcgcagacctccctcctgccaaccccgatcacatcggtggctacagacttgccacggccactttcgctggcattgaaaacaagtttggcctttacctccccaagtttaagtctcctagcgtagctgtggctcagcccaaggcggcggcagcagcccaatgacatagcaagtacagaccgaggcccaggagaacgggcggtaccgtgtccagtcagctgcatggtactgtcagcgctggggtcaaccactttctatacgacctatacatgtattgtttataaagtgatcatacgcccagggagagccgcagtgcagtttcaagctttagtctttacgtgttgaaatgttttctgagccttggcatgaattacgtgttctagactctgcttcgcacagcttgtacctacagtgactgtacatattgtacatctttgtacagagacacctcggcacctcatcccaacaaatcacgtttataaacatgaaacgctgttctgagtggcttgaactgtacagaaggttttgaaagtgttttattatgaatcatgtaagaataaatgtactaaagttaaattcattctcctcctgatgacttatggaaatcaagcagccatgtttgaatgtatccagtttcagtttgttttccattcgcgactaggaaggtatttgctgatacaaggcagagcgaaacttaatgctcaccacattaaataagaaacgcgtgggaagggtgcttgcccgtggatgccagaggatgagccggtgactcacgggctgctgtgtttccagtcgtttgtagctgagtgtaatcctcctgtcagctggaagcagctcctcatgcgcgcgcg

SEQ ID NO: 48 - DNA, 2865 bp, Mus Musculus
ctctggtgtcccccgcaagaggtgcgactgccccgccggcccgctgatggatcaaccaaggccactcggtgcgcaccaccgacgcgctctagctcatttgcatatagacgggcgcggcgctgcgacaggagggagcgcgggcgcggccccgggcggtggcgcgcgcgcgccctgacagctcggcccagctcgctcactcgctcgttcccggcttccgagcacagcatggcggtcaaggtgcatacaaccaaacgaggtgatcctcatgagctgagaaacatattcctccagtatgccagcactgaggtggacggggagcattacatgactccagaagacttcgttcaacgctatcttggcctgtacaacgatccaaacagcaacccaaagattgtgcagctcttggcaggagtagctgatcaaaccaaggatgggttgatctcctatcaagagtttttggcatttgaatctgttctatgtgctccagattccatgttcatagtggctttccaactgtttgacaagagcggaaatggagaggtgacatttgaaaatgtcaaggagatttttgggcagactattatccatcaccacatcccttttaactgggactgcgagttcatccggctgcactttgggcacaaccgcaagaagcacctgaactatgtggaattcactcagttcctccaggaattgcaattggaacacgcaaggcaagcctttgcactgaaagacaagagcaaaagcggcatgatctcgggtctggatttcagtgacgtcatggtcaccatccggtcccacatgctcactccttttgtggaggagaacctggtctcagctgccggagggggtacctcacaccaagttagcttctcctacttcaacgcatttaactccttactcaacaacatggagcttgttcgaaagatctatagcactttagcaggcacgaggaaagatattgaagtcaccaaggaggaatttgcccagagcgccatacgctatggacaggtcactcctctagaaattgatatcttgtaccagcttgcagacctatataatgcctcaggtcagcaatctcctggcttgggcagacctatctggctccagattgccgagtctgcatacaggttcactctgggctcagttgctggagctgtgggggccactgcggtgtaccccatagacctggtgaagacccggatgcaaaaccagcgtggtacgggctctgtggtcggggagctgatgtataaaaacagcttcgactgttttaagaaagtgttgcgctacgagggtttctttggactgtaccgaggtctgatcccacagctgataggggttgcaccagaaaaagccattaagctaacagttaatgattttgtccgggacaaatttaccaaaagagatggctctatcccactgccggcggaaatccttgctggaggttgcgctggaggctcgcaggtcatctttaccaaccctctggagatagtgaagatccgcctgcaggtagccggagagatcaccacaggaccgagagtcagtgctctgaatgtgcttcaggacctgggacttttcgggctgtacaagggtgccaaagcctgtttcctccgagacattcccttctccgcaatctattttcccgtgtacgctcactgcaaactcctcctggctgatgagaacggacgcgtgggaggcatcaatctcctgacagcgggagccttggcaggcgtacctgctgcttctctggtgacccctgctgatgtcatcaagacaagactgcaagtggccgccagggccggccagacaacatacagcggggtcgtcgactgtttccgaaagattctccgggaagaagggccctcggcattttggaaagggactgcagctcgggtgtttcgatcctcacctcagtttggtgtcactctggttacctacgagcttctgcagcggtggttttacatagattttggaggcctcaaaccttctggctcagaaccaacgccaaagtcccgcatcgcagacctccctcctgccaaccccgatcacatcggtggctacagacttgccacggccactttcgctggcattgaaaacaagtttggcctttacctccccaagtttaagtctcctagcgtagctgtggctcagcccaaggcggcggcagcagcccaatgacatagcaagtacagaccgaggcccaggagaacgggcggtaccgtgtccagtcagctgcatggtactgtcagcgctggggtcaaccactttctatacgacctatacatgtattgtttataaagtgatcatacgcccagggagagccgcagtgcagtttcaagctttagtctttacgtgttgaaatgttttctgagccttggcatgaattacgtgttctagactctgcttcgcacagcttgtacctacagtgactgtacatattgtacatctttgtacagagacacctcggcacctcatcccaacaaatcacgtttataaacatgaaacgctgttctgagtggcttgaactgtacagaaggttttgaaagtgttttattatgaatcatgtaagaataaatgtactaaagttaaattcattctcctcctgatgacttatggaaatcaagcagccatgtttgaatgtatccagtttcagtttgttttccattcgcgactaggaaggtatttgctgatacaaggcagagcgaaacttaatgctcaccacattaaataagaaacgcgtgggaagggtgcttgcccgtggatgccagaggatgagccggtgactcacgggctgctgtgtttccagtcgtttgtagctgagtgtaatcctcctgtcagctggaagcagctcctcatgcgcgcgcg

SEQ ID NO: 49 - protein, 650 aa, Mus Musculus
MAVKVHTTKRGDPHELRNIFLQYASTEVDGEHYMTPEDFVQRYLGLYNDPNSNPKIVQLLAGVADQTKDGLISYQEFLAFESVLCAPDSMFIVAFQLFDKSGNGEVTFENVKEIFGQTIIHHHIPFNWDCEFIRLHFGHNRKKHLNYVEFTQFLQELQLEHARQAFALKDKSKSGMISGLDFSDVMVTIRSHMLTPFVEENLVSAAGGGTSHQVSFSYFNAFNSLLNNMELVRKIYSTLAGTRKDIEVTKEEFAQSAIRYGQVTPLEIDILYQLADLYNASGQQSPGLGRPIWLQIAESAYRFTLGSVAGAVGATAVYPIDLVKTRMQNQRGTGSVVGELMYKNSFDCFKKVLRYEGFFGLYRGLIPQLIGVAPEKAIKLTVNDFVRDKFTKRDGSIPLPAEILAGGCAGGSQVIFTNPLEIVKIRLQVAGEITTGPRVSALNVLQDLGLFGLYKGAKACFLRDIPFSAIYFPVYAHCKLLLADENGRVGGINLLTAGALAGVPAASLVTPADVIKTRLQVAARAGQTTYSGVVDCFRKILREEGPSAFWKGTAARVFRSSPQFGVTLVTYELLQRWFYIDFGGLKPSGSEPTPKSRIADLPPANPDHIGGYRLATATFAGIENKFGLYLPKFKSPSVAVAQPKAAAAAQ

SEQ ID NO: 50 - DNA, 110392 bp, Homo Sapiens
  misc_feature (27112)..(27907): n is a, c, g, or t
  misc_feature (28517)..(28590): n is a, c, g, or t
  misc_feature (73934)..(74126): n is a, c, g, or t
ggccctgctcgctcactcgctcgtccccggcttccgagcacagcatggcggtcaaggtgactccaactctctgctgctgcttttattgcataagagacattccgagcgccctgcctgcagccccccactgcttcccattttattcattgtctaggtcttagatagcttgtcctggggctccggcttgctgcggggagagctgtgcggggcttggaccggaggaggggatgcccggctgggggaggggaaggaggagggattgtgagttgaaggggcttgtacggtaacacgggtcagtgaaggaagagtaatgtcctgtcctaggtgcatgggattgtgagtccggagttggagggcatcagaaagggtgtgggaggaagtggcaagtaaagctggggatacctagggtatcagtgaattgcggtgggggagggagtaagtattgagtaatttggggcctcaataaggccgagggcagtggttggcttttgcgttgcagattgcagggtatcgaaagtatttgtatttgtggcagctctcatattttaggttggatggggagagggacgcggagataattacatgttgggtttgctttttatggagaaaggctgctaggccaagtgattaatttgggtgatttaactttcctgttgatctactcttgttagcttcttgatttgaaggtgggtggttactactgtgttgctagtagatgtggaataaagtaaaagatcctcattgccttccctttccagtccagaggaagcactgtccgatagctttgctgtatcttaggctattcgcacctgtttttctgccctctagtcacagttatccagtttgacagttcttatcagcaattagggcttttagtttgttttaaactaaatgataaaagataggagcattgattgttagccatgtgacctctaatctgaagagattgtgtggtctctagtgaagcattaactggcttttttttcttttttgcttacaggtgcagacaactaagcgaggggatcctcatgagttaagaaacatatttctacaggtaaattggcttgcatagtgtgcctttcattgcaaaaacaaaaaacgtacatgtccttagtcctattcatgccttaactttgaggaatgttcagttttcatgtattctttcaaacatgaccggacaatatagcttatacttctcttaataaggtttgatttaaggccttcttttaattaagggtcgataaaaggttttcctcaagttactgcttttttttttacatgacttaagatatatattttgaaaaaaaatttccagcttaagcacagagaccaagataaaatttcaaaatgtattggcattcttgtatagttaataggtatgatgactaaaattctcttccttgaaagttgcatgtttacaaagttttcctacttatgagctatcctccatgtaatttgttacagagataagaatattatagctattcttaatttgtgtgtcttacttacattgtatccttaagcctttggggattttaccccaaaatgttacctcttaagattcttgcaatggtctaccttaacttctaagcttttagaatcagtgacttggctgtagacttaaaaagaaaagaaaaaagaaaaaaaaaaggttggcttagttttttgttttgctttcttttcttaaatttcaaaagtttcctatgcaggaaattgtacttaagaagtagatgtaggccgggcgcggtggctcacgcctgtaattccagtattttgggaggccgaggcgggtggaccatgaggtcaggagatcgagaccatcctggctaacacggtgaaaccccgtctctactaaaaatacaaaaaattagccgggcgtggtggtgggcgcctgtagtcccagctactcgggaggctgaggcaggagaatggcgttaacccgggaagcggagcttgcagtgagtcgagatcgtgccactgcactccagcctggggacagagagacactgtctcaaaaaaaaaaaaaaagtagatgtaaagggaggcaagctaaggtgtttcaccaaatattgcatttctctctgaaatcttttgagaactttctattctggacctgggttcttatgaagacactttgaccttgggcaggtccctgctgtgtattattttcctctgtgaaatgagaggtgatctccaaggttccttcccattccaaaagtctatgagtctattttaggaacagattctaacatatgctgatgagcctggaatagatgacatttttatttgagatatgtggtttgcttaagctattgttgggtaagacgctgcgtagttgagcatacatatgtgtagtttatgaaaaataatttgtgaaaatgggaatcttaaaggtcataatatctgataagggaagtatttttttccagaacagaagtaattataataacagaaatggtccatttatgacttgaaacctttattccttgcaggcattcttgaaaatagccaaaaatatatcggtattcaccataccatgtgattatagtcaattgttttgtgaagagttcatgtgatatagttaattttatgttctagactaagtagatgcggaagaaatgagttgaaatgctgcatgatgtagtgaaaagaatactgcctaggtatctgagtactgcctaggaatacggagttaattcccagccctgcatttatctggttcttgtacccttaggctaatcatctggccttcctgagtttcagcttctcatgtgggactcagtgggacataaaggaatgggaattgaggtctttctagctttaaaaattctatgggaaaaaaatatactgtgattctgtatggatttgttttttgtttttgagtgggggtagaggtgggttggaggtatgaggagaatggcgaggactgtccctagctctttgacaacttttttttttttttgagatggagtctcgctctgtcgcccaggctggaatgcactggcgtgatcttggctcactgcaacttctgcctccggggttcaagcaattctcttgcctccgagtagctgggattacaggcatgtgccaccacacccggctaattttttgtatttttagtagagacagggtttcaccatgttagccaggatggtcttgatctcctgacctcgtgatctgtgtgcctcagcctcccaaagtgctgggattacaggcgtgagccaccatgcctggccgattctttgacaacttttaaatcttagcttttcatttactgttttgcatatcgtcattatctttttacacattattttgatgatgcctttatttttatgttgaaaatttgtggaattcataactgcttatttagcactaagtatgaaacattgacacaagcattattgatagataagagagtgatagaatgtaaatactcaccttcagaaaggcctaacgcagcaagaaagataacaatataggctgagtgcagtagctcacacctgtaatctcagcactttgggaggctgaggctagaggatcacttgagcccaggagttcaagaccaacctgagcaatatagtgagacctcgtctctgcaaaaaattttaaaaattagccacacctggtggcatccatctgtggtcccagctactcaggtggctgaggtaggaggattgcttgatcctaggaggcagaggttgcagtaagccaagatcataccactgcactccagcctggcaacagagcaagaccttgttacacacacacacacacacacacagacacacacgatacagtattgctagttggatcaatttgaggatagttaccaagtaaaagatttttattcctggcttgaatacttcaaactatagttatttgaagctttgcagtactgtttagaaacagttttatgaaacagttttatagatgcatatagttgattaatattttagctataatagaagacaaaaatacatgctaaccgtgtatttctttagcacttaacatatttacccaacaaatatttacaaaggattatttgctgtgtaccatgcacttttattcaatacaatactgttcagtagcagacaccaagtcgaatatcaagagagacaacagagccaagacctaaatgctgatggacatgtgattggactagctgctctctcaggcccatgccatctctcatggtttgtggttgagggaatcaagaatagtgaaggcaaatgcatagcctgtggtagagcaatcagattggcttcttacatcatagtggctgtgtaataatattgacaatggctaacatttattgatcatttagagtgtgcttgagattggcctagtgctttaaggatattaatgttagttttcataacaactttatgaagcaggtttaatatccttgttacatagatgaggttaaattaatgtcagactatgtggtagagccagattcaaatcaaattccagagcccatacccttaacccttacataatactactggtaggatattgaaatggggtgacttttgaaagacagaggtatatcaggggataatggcagagtgttaagaagttaaaaaaaaatctggttacttaggtgatgaaatttaaaaagtttctttacactgtaactgtctagaatagttagccaaggaatttggatttgaaacagtagggagccactgtgggtttctgagtaggcaaattgaagtggtgaattctggcagctttttgtgtatgttggataaagtatgaagagattggaagtagcttaggtgataagctgagaggctactgaagtaatacttttgagaattaatgacctagagtggttgatggctggggaaatgaaaagcaaggacaataccagcgatgtaagggaagaatctatcgaatttggtattaaatatggaagtaagggaagaagtagaagtgaacctgtcagttttaggataggtgttaattgataaggcatctatttggataatattttttggggggatggggttagtttggttgctaaacaaatgtatctcactaagttaaagttggatttggacagatacaaatttgtgcaggtggtagatgaattccttgtatataaagcaaggcagaggatcaggggctgatttataagtgatatctccaattgaagtaggaaggaggaggaggggaaatagggagaatggtcccatgaaagtttaaagtaggagtttcacaagaaggatataattaaaggttaaaatgtagattattctgttattagtatgatttagtttggggaggattttggggtcacttgagtttagaattatctgagctacttaaagactataaagagatgtaattttaaattttagagtacagttgaaaactctttgtaaaatgtagatctgtggcattaactgtttaagttcacaaatagtcaataaaaattcctactttcaaataagaatattttgttaaacttttgagccatgggtcaaaagtcatttgtaaaacaataaaatggccgggtgtggtggctcacacctgtaatcccagcaatttgggaggctgaggcgggtggatcacttgaggtcaggagtttgagaccagcctgggcaacatggtgaaaccctgtctctataaaaaatataaaaaattagccagatgtggtagcgcacgcctgtaatctcagctactagggaagctgaggcaggagaatcgcttgaacccgggaagcgggggttgcagtgagccgagattgtgccactgcacttcagcctgggcgacagagcgagactcactgtctcaaaaaaaataataattaaaaaaatatatatatatttttatttgaaagtactggtatatcagctgggtgcggcagctcatacctgtaatcccagtgctttgcgaggctgaggtgggaggatcacttgaggccaggagttcaagaccagcctgggcaacaaagcgagattccatggctacaagtatatgtatatagatttagctgggtgcggtggtacatgcctgtggtcctagctgctctggaagctgagatgggaggatcacttgagcccagaagttcgaggttacaatgagttatcattataccactgcactccagcatgggtgacagaacaagactttgtctccaaaaaaaaaaaaaaaaaggaaaaaagaaaagaaagtggcaactgacttatttatgtatctatgtttagtgaaattgtatgagaattggtgtgggagttcataagaagggctttataagagtaaagcattattattttgaatatagggaaataggttcatttttcctgtggtgttcattgcttctcaagttttgatgagctatgtttctattagttaaaaaacatcaacaacaacagtatgcactaagattctgcctttttctgcccacctccactctgccaagttcatgaaattggagtacaacaaatgaattcttatgtgttaggctgtgctgtaattttacaactggtttaagctaagattttaccattaccacccttacaactgtcatttcttgatttatcccttttttcttttaacctctctcacccacacactgtcattgattcaatttagctacatcagcagtgtacagtagcaaaaggagacaatagaagcagtgaagaagaaggtgaggtgggacagcaggaacataagtctgacaaatttctaaatgaagagttaattttgtctgtcccttgtggcaaagtagatttatcaaaaacatttaaatgaattattttttaatctctctctctttttagttaataggcttcttttgtttgctggtgtgttgtatagtaaaggcaatatatgttaagactgcaactatatttgccagatcaaaaatttactgaaatgtagacctcaaatattattttaattttgttcttttttcattatcaccaatgtaacaatgaagatcgtatcccatacaaaattatgaaaatgtgcttttttcctgtcttattttaggttagagaataaagaggagaagatactgttaatgtaaagcaaagggcgattcctccttagggtttttacaataacatttatttttaatagaaagatatgttcttttattcaaatagtttatgtattttatttacttatttttgacagtagcctggagctgagaagggaataaagcagggcttttagcaggagacccttactctttgttgaaatatacattagggctgtgtttccaaaagtgtggaaggtataccacaatattagagtaacaataagattatcaagtattaaagggtgatacagtatttgtggaaacaaagactctgaaaagcaagctggcaatggtttaaaataaaaagaaaatatcatttgaacaaacaatggtattttcttttggattatttatcccagagaaataaaaatatttgtaaaaatataagaatatagggcaagatgtggtggctcatgcctgtaatcccagcactttgggaggccaaggtgggcggatcacaaggtcaggagattgagaccatcctggctaacatggtgaaaccctgtctctacaaaaaatacaaaaaaattagccgggcatggtggcgggtgcctgtagtcccagctactcgggaggctgaggcaggagaatggcgtgaacctgggaggctgaggttgcagtgagccgagatcgcgccactgcactccagcctgggcgacagagcgaaactctgtctcaaaacaaaaaaaaaagaatatatatgtacaaggttaactgcagcactgaatttttcctcaaaaaagaaaaaaaaaaaaaacagcctaggcaacgtggcaaaaccccatctctacaaaaaatacaaaaacctagctgggtgtggtggtggcatgagcctatagtcccagttacttgggaggctgaggtgggaggatcacctaagcctaggaggttgaggctgcagtgagccatgtgcaccactgcactccagcctgagtgacagagtgagactctgtctcaaaaaaaaaaaaaaaaaaagctattatattaaagaggagtggtagaagacttatggaataactatactatgaaagttatgcagatactaaaaagaatgagttaggcctagaccaccaatttagagaaattttgcaatgtactattaagtgagaaagatgcaaataagtatatatagcatgattctgatttgtaaaacaaagtcatttcatgtatgtttacatataatatgtttgtgtatgatttaatgagcactgagaaagttatgaaaggataaatactaggttgttaacttgagggaagaataaagaggaaaataaaaatagtctcaatgtatatgtattaagctttgagcaagtgagtaatttaaaaagtaagaatttagcaattcagagcctgaagctacaagaggatttcccagcataatttggattgaataaacccagtatgagacacacagaaaaggatctatagttttattaaccatgctattataattgagggttttcaccagttcctcagaaatatggaaattgaagatgataacctatttatttatttatttatttatttattgagacagagttttactgtgttacccagactggagtgcagtggcatgatcttggctcactgcaacctccgcctcccgggttcaagcaattctcatgcctcagcttcctgagtagctgggattacaggcacatgcctagctaatttttgtgtttttagtagagacagggtttcaccatcttggtcaggctggtctcgaactcctgacctcaggtgatccacctgcctcagcctcccaaagtgttgggattacaggcatgagccaccatgcccagccttttctaaatactttagaaagtatttaacataaactatatagagttctcattaaaaaaaaaaagaacagtattaggcattaaaggcagactagcaggatagtgagactttgtccttgaatcaagcagaaggattgaaaaataataaaaagataagaaaattagtgttattaaatgccatgtgatgttctactaccaatcaatacactttttttttttttttgagacggagtctctgggctcactgcaagctccgcctcccaggttcacgccattctcctgcctcagcctcccgagtagctgggactacaggcgcccgccaccacgcccagctaattttttgtatttttagtagagacagggtttcaccgtgttagccaggatggtctcagtctcctgactttgtgatccaccctcctcggcctcccaaagtgctgggattataggcgtgagccaccgcacctggccgatcaatacacttttaattgcctactttgtaccaggctaagcactgtactaggttctacctttatagagataagatagagctgtttagtgagggtagggacaatacaaaggacctcagtgaaggtagaacctcacattcttttttttttttggtgggggacagagttttgctcttgttgcccaggctggagtgcaatggcgcagtctcagctcactgcaaccactgcatcccaggttcaagcaattctcctgcctcagcctcctgagtagctgggattacagatgtgcaccaccacacctggctaaattttttttgtatttttagtagagatgggggtatcatcatgttggccaggctggtctcgaactcctgacctcaggtgatgtacctgcctcggcctcccaaagtgctgggattacagatgagagccaccatccgtgcccagcctagaacctaacattctaggggcgaggtggacaattaaaaaagcccacagagcagaccacgaggtcaggagttcgagaccagcctggacaacaaggtgaaaccccgtctctactaaaaatacaaaaattagccaggcgtggtggcgggcgcctgtaatcccagctacttgggaggctgaggtgggagaattgcttgaacccaggaggcagaggttgcagtgagccgagatcgtgtcattgcactccagcctgggcgacagaggaagactcagtctcggggggaaaaaaaaaaaagcccacagattggctgggcacactggctcattcctgtaatcccacctctttgggaggctgaagcaggaggatcacttgaggccactagtttgagaccagcctggccaaaaaagtgagattctgtctctacaaaaaaaaaaaaaaagataaaaaagaaaagaaattagccaggcatggtggcctgtgcttgtagtcctagctactaggaaggctgaggaaggaagatcatgtgagcccaggagtctgaggttacagtgagctagggtcatgctactgcactccagcctgggtgatagagtaagaccctgtctcttaaaacaaaacaaaaaacaaaacaaacaaaaaaaagcttactacagattgtgacacgtccaaggaagtaaacagaataatgagaagggccatcattttttaaatcatttttcaagagagtggtcagtgaagggcccttaggaggcaatattaagagctgagaactaaaagggaatgagggtgaagtggtggagggaattccaaagggctcacacgtacaaagcttagatatagaaaagggtttgatgtgttcaacaaacagaaaggccagtgtgcctgaagcattggtaattaagtatgggggtaaatggcctcccaaagtactgggattacaggcgtgagccactacgcctggccgattctttcaatttaatgtcctcctgtctatagagttcctagaacatcttgagctggatgaaactccttttcatccagagggcagcagagtgtacctggagcctacatgggatttgtagtctaacctgggtttgaatcctcatttgaaaccttttgagctcaggtgtttacttttggagcctgttttctcatctgtctaagaagggataatgacacctagcacatagggatgttctaaagattaaataaaataacatgtaaactatgcagaaccaaataaagcttagttccttgtctctttccttctcttctaagttgagattaggatgttttgtttgtttcttgaataagatctgagtcccttgtcttctccagatgactatgctggacctagtcaagagactaagatgttaatatgtatttatgattatgtacatataatcagttaattacttacattcttgagacatccatctgaagttattgacaaataccgatttctctcaagtctatgaggttctaagatgttgtatagtcacagtctaaggctgggagacccgagagaccatggaagatgtttgcagagttttcttctgaaacttcattcgctcagtctggacgtgtaaaagaataacggtccagccataggctctgaaatcccaagacacagacttgaaaaaatacatattttttttttgtgcgtaactttcttttttaaaatcaccacctccctgttctgtgcagatttctcttacttagtactgtggaaatttctgaaagcatcttccactgaaaccattgctatggccagcgttgggtttctagaactggaagaaacacacattttgaaaatattagtcagtactatttcagtcttcagtgacaggaattttggttaaacatgcgtaggcttagaatgtactggctctagccatgagtggatcaggagcttaactgctgtcaccagggatcatgcacctttcatctcttagttttggtttctgttgtgctagcttcattctcaaacaggctttgccatgtggagcatccccagattaaaatcctacccattcagcagagaaaaggtactgtttctccaatttctaggttaagtctaggaattattgtcctccctaataccccaagaaaacccatgtactagaaggaggcagtgttctcattggccagatctggttcacatgctcacctctggaactgttcagttgagtcagccccatttgaatgacctgtgtaaattgagggtgagggaggtgtgtatgttcaagaaaaattagcatgcagttaccagaaggggggaaggaaagctaggcacattaaaaccaagaactgtttatgtatagcatataagggattggaaaacctggaagcctaggggtgactcagggaggctgggagacagagatggcaagagattctgtgcctccaagtcaacactgctgtatttggtagctttctagaacattccagtgcagctgtcatactatctgcaaaaataccttaagtgaaatgacaaaaaataaccaaaattaggacccctgaagaagaaatgtatcctcacctcattttttcttcagaaaaattttttctctcagtcttctttctagtctttttcttatggtggtcttcctctccccatcttcttttctgtccttaccctacccctcccatcccatggctcattattttcagcagatctgttcaacacagattgctattgattgtcctacaaagagccaggtactgtgcaaggtgctagaggtatgaggatgaataaggtatccctgtttttaaaggactcatagcctagagctgcttaaattacacatccctacattaatacttttttaaaaaaatagaacattctgtataaagctgaaggcttgaagtccttcctgagctctaccccaaaagccaatacttctgaaggcttgaagtccttcctgagctctaccccaaaagccaataattccctgccacctaagaggtaaccactgttcttggtcgtgtttctttctgatctttccccatacatttacacagaaaatatggggttttggccgggcgcgatggcctgtaatcctagcactttgggaggccgaggcggctggatcacctgaggttaggagttcaagaccagcctggcccacatggtgaaaccccatctctactaaaatacaaaaattagccaggcatgatggcggatgcctgtaatctcaactgctcgggaggctgagatgggagaatcgcttgaacctgggagatggtggttgcagtgagctgagatcacaccactccactccagcctgggtggctgagtgagactccgtctcaacaacaacaacaacaacaacaaaaaaagaaaatatggggttttgtggttttaaaaaacataaataataatagctaatgcttactgtgtcactgttatgtatcaggcactattttaagtattttatataaatcatcatatttaatcctcagaacaactctataaggtaggaacgattagtattcccattttacagatgaggaaactaagccccagaaaggttaagtagcttgttcaaggatatacagtaaacggaggagctttgctttatatattttaatacaattcgccttttttacttaatattatttggagatacaggtatgttagtgtgtaaagaattgtttcattatttttctgtagccctttaaataactttgttatgaaaaatttcaaacatatacaaatctagagaaaatagaataatgatggataccatggatgactagagggagaaaggaaggaggggaacagggtggaaaaactattgggaactatgcaaactctctggctgatgggatcatttgtaccccaaacctcagcatcacacagtattcccttgtaacaaacccacacatgtaccctcttaatctaaaatatgaattgaggctcatgcctgtaatcccagcactttcgaaggctgaggtgggtggctcacttgaggtcaggagttcgaggccagcctggccaacatggtaaaaccccgcctctactaaaaatacaaaaattagcgtggtggtgcatgcctgtaatcccagctactagggagactgaggcaggagaatcacttgaacctgggaggtggaggttgcagtgagccaaggtcacgccactgcactccagcctgggtgacagagggagactccatctcaaaaaaataaaatatgatttgaaattattttttaaaaagtttgttgtaattctaactgaattaataaactttaaaattcatacaaaaaaagagaaaatggtataatgaatcaccatatatctgtcattccagtgtcaccaattatcatggctaaccttgcttcatctgtattacagccacagtggcttattttgaagcagttctcagacatcatcttgcagtatccataaatagttcagtatgtagctcctaaagataaacactctgaaaaactaaccaaatcataacaccattatcacacctaaaaaaagtcttatcatcaatttcttttgagtgtcgaagttctctgattgtttcatatatttttaagtagctttgttaaaaagcaggatccaagctagattcatacattgcatttggttgatctgtttcttagatcttttaatactttctgcaccctgctatgttaaaggtccttatttctctttggtaaaaatcttggtatttaatcaaggcttatcaacattaaggcattccatccccctaggagcagcaccttgattgtcaaagcgacatgatttgcccaagcttatacatatatatgcttcttgtatgttcccatggttacttagactaagagactaaagtatttatttaaggaatgatgcaaattaattattcaacttaatctgccttgggaagcattctagttccagttattgggttctttgggtcattattttatttccaaggtttttggttattttgagtggaaaattgttttggtagatcttctttattatggtagcttcaattgatttcattgattaataagggtctttacctccctgctgtgttagaaattgcatcattcagtagctgacagtagggcttactatagtggacagtgaaaatatattaaaacaacaacaaaaataagcacatagtattcatggaagcaatctgagttaggaagacagagcactgaataatatttttttagcaaaatcagtaaaaggttttgtttctagtatatccaaaatatgcaactgaaagtgctaatcaaaattagatttatacaactgcttttccctaatgctcatgtagttgatttgagtaacattggaaaaattttacattactaattaaaatccttgtttttaaaaattaatatggcttaataaagttgttaaaaaatcaaactggccatatgtatttaaaataatttttttcttataaagtattatttatgatagaatgctcttttattctaattgaactaacataataaggcaaattacacattgtactgtttaacagggtttgtgtgtcagatctgctgtggtctttgctccttatgtagagtgcttgtgtagtgaaagggcatgcattcctgactaaatttggcttctgttggaagtaagagccataatagtgaaggacagtaagagaactagcttcatatactcagtacttgccttagtacatattgtcctcttttattgttcaaataattcatttttctatgtgggaaatgctctatgagatatctgtagttactaaacttcatgatattgtcatttgaattactgaaattgaaaggatgttaagatctgaaaatgtcagttcatctcagttggaacaaagtaatggaggaacagtttgttttgactcatattacagccacatgttggttagacagagataaagctgcctagaccagtcaggaccgatctcgtggtaagcccaggaatactggaagccaacccagggaaactctggcttggagagagatgaaaggttagaacaataatttcttcatgtttgggcaaaagcagaagaattcactaagcaaggagggaaatagagatcctatgcttttctgtttctaagcattttacagtaactatttcaagttatattttacaattttgaagtactttggtgttcaaggtgtcatttttgcctcacaataggacagcaatttttctgcaaacccttgttaaagaagagactccaagaatctgcatgttttgcccaaaaattcttgagttaatggcacaggagtttagaacccaagttttctgacccagttttagtgtccgtcgtgccatcatctctgagctacttgacagcaggcactatgtcttgttgatctctgcatccccagtaccaggcaccaggcatagtgcctggtacacagtttcaaaatgaatgcaaaataacctgaaagatttgatctcagcagatttttggcttaaaaagcagtgtttctagatatattgccttagttttgatgtgcatacttcaaaaatccttaatcttgatacaccatataattttttaaaagtaaccagttttctagtcacaacacatcagaatttttctttatagtctctggaatatcttttagagatataaaacatcaaaggatctgtttatgaacttaaactatttaaacaagtaatttgtatcatttagagtgtttgggctttatgctcattcaaatcattgaattttaagttaacctttttttcttagtggaaatttagggttgtgtgtcagtctttgtaatgtgtagttaatataataatataggttgcatacatcctttttttttttttttttcctgggatggagtcttcttctggtcgcccaggctggagtgcagtgagtggcacgatctcggcttactgcaacctccgcctcctgggttcaagtgattctcctgcctccgcctctcgagtagctgggattgaaggcacccaccatcaggcctggctaatttttgtatttttagtagagatggggtttcgctatgttggccaggctggtctcaaactcctgagctcgtgatccacccgcctcggcctcccaaagtgctgggattacaggtgtgagccaccgtgcccagccggttgcatacatcctaaaggtcacttaaggttaaatttggtaaattgcaaaggagttattgctatccagtttattccagtcagttgaagccttggtatgttgatctgttggcttggtaggcaaaacatttttaaatggcatgatcttctcatttggagctagagatagttcagtgtaattatgatacacatctgtatgtgaaaccctgccatcttttatagacaataattttgattaaatgtatgaggattctaatctcatgagatctattttatttcttaagctttagaatgttaaggctttcctgagcacatgctaactatactcaatgtaaatttaaatatttctggaaatgtcaaagctgtatgttcttttacatttcaaatacttgagttgggcttggaaaaagtttaatcaagaaaatggaccagctatttcagatacatttcagatactgtcagctactttatgtcaatgtcttccatgtgtccttgacttcttgccccagagggatatacaactgcttaagagatatctttgaaatggcaaatgataaactctaaagttacttggagtatagacatacttgggtaatttcatctaaagtcattttagttcatcctttgaaaacacaggaacaaaatgaaaattatattatgaaactattaaattgcttgctatactaagtgtgtatgtgtgtgtgggggggcaacctagtgggacccccatctttacaaaaaaataaaaactgaaaaacttagctgagcatggtggcacgtacctgtggtcccagctactcaggaggctgaggtgggaggatcacttgagtccccccccccccaaaaaaaaaaaacccaaacccctgatttaaatatatcaccaatttttgaggtaccagcttttctttgttagcataatacctaaaatattttagcatttttgactgactgtgggtagatagattctagtttcagatctaaactccctctttggttgtgttgttcaggcaacaggcttacagacattgccaagtaattgtctctaatttaatgagttaattagttaactgtctcctgtagaagtcaagtactgacttcttatggatgggagaaaacttatgcttttttcctctaagctatacactctatctttcagttaaaattaagttaaaatagagtaggagagctggagaaaacactggcaaaatacctcagggtaagtggttctttggcatcatttataaccccagatactggcaaagcctgtttcagtacatgtcaactaaagcatttgttttctttgttagccgctgtgtcctttgtggtttgtgctaaggctgctctatttcctgatagttttaaagtcaagaatgttgacatcttggcgattccatatatacagtatactttaaaaatttttaaatgttagattcaaaaggcccatgtgcaggtttcttttttttttttttttttttttgagacagagtcttgcgctcgcccaggctgtggtgcagtggcgcaatcttggctcactgcaagctccgccgcccgggttaacaccattctcttgcctcagcctcccgagtagcggggactacaggcgcccgccaccacacccagctaattttttgtatttttagtagagacggggtttcaccatgttagccaggatggtctcgatctcctgacctcgtgatccacccgtctccgcctcccaaagtgctgagattacaggtgtgagccaccgcgcccggcccccatgtgcaggtttcttacaaaggtatgttgtgtgatgctgaggtttggacttctgttgatcctgtcatccagatagtgaacatggtaccaaacaggaattttttcaccccttgccctttctctctctccccgctctaatagtccccagtatctattgttcctgtctttatgtccatgtgtacctgtaacaggtagagggtcttgactgcaagttgtccaggttcttggcattttgaacagagttggacaaaacgcccagcaaagcaaggaaagaatgaagcaatgaaagaacgaaagcaggaatttattgaaaatgaaagtacactccatagtgtgggagccaatgagcagcggattaagggcctggatacagaaacttctcgcgtccaaatacttcctagaggttccccattggccacttggtgcttacctcatgtaaatgaagtggtggcccgcaattggtctgattggttgcggaaagcaacctatcagaggctgaagtgaagttataaaggtcacactcccgtacaaacatctgattggttgcagaaagcaaccaatcagaggctaagggaaagttacaacgttgtatttctatgcaaaggaagagtctgcctgcagtcggtctgattgcgaacagccaatttcccatctgccgtggagaaaagggggtttgcgaagggagtagcctcaggtccttttgttacttaggtgtggaaagttagggttttcctttcaatttagttctaggaagttggtgtgaaatggcctccagaccctgttctcctgcctcatacccaatatttaattcccacttttaaaagagaacatgtgatatttgattttctgtttctgcattaattctgcttaggataatggcctccagctgcatccacattgttgcaaaggacatgattccagtcttttttatggctgcatagtattctatgaagtagatgccatacagaacgcttgtattgtgtgtttgtgttttttatttagtggttgtagtcctggaggtcaaattcagatattagagaatagacacctctgtggcaaaaagaacaattgttgccaaattttcttaatacaaaatctctgaaatgttttcatgtgctcccccctcttttatcatctgttaatgaaacaaagaagcaacacaagcagttgtgaagagcgagaacaaagatcaccataatcccatttctagtattttcttttttctttttttaaatttgagatggagttctgctcttgtcacccaggctggagtgcattggtgcaatctcggctcactgcaacctctgcctcccgggttcaagaggttctcttgtctcagcatcccgagtagctgggattacaggcacctgccaccacgcccaactaattattattatttttttgagacagaattttactcttgtttcccaggctggagtgtaatggtgcgatctcggctcaccgcaacctccgcctcccgggttcaagcgactctcctgcctcagccttccgagtagctgggattataggcatgcgccaccacacccgtctaattttgtatttttagtagagatggggtttctccatgttggtcaggctggtctcgaactcccggacctcaggtgatccccctacctcagcctcccaaagtgctgggattacaggcttgagccaccgcgcctggccaggattcgagcatttttatgattatatataatgtatacttgtgtgtatgtacctatatattgctaaatttcttttcaaaaggactgaattcgacaaaagcaagatgtataggacggtataaatagtatgctatcatttatataaaaagaaatggtaagaatttcatatatacacacatatatttggatgtatatatattaacattatatatataatttacttgtttatggataaaacatctctagaaggatacataagaaatcgattgcctctggggtgggtaattgagtgattgggaacagaagtaggaggaagactttccactgtatattctttggtaccttctgaattttgaatggtatgaatgtaatactattaaaataataaaaaaccattagcaataggtaaaagtacccactgtcttctttttcatgcccactgtgttggttcaggcctcaagctgtttcacctgtatcttttatttatttatttttttgagatggagtcttgctctgtcgcacaggctggagtgcagtggtgctatcttgggtcactgcaacctccgcctcccaggttcaagcaattctcttgcctcagcctcaccagtagttgggtctacaggtgcgtgccaccacacctagctaattttttgtatttttagtagagatggggtttcaccgtgttagccaggatggcctcgatctcctgacctcgtgatctgcctgcctcagcctcccaaagtgctgggattacaggtgtgagccactgcatccggccctcccctgtatctttgtaatagccacttaccagtctccctgttcgaagttagttcttctctccttcactcaccttttatgttgccatcaaggatagcacagatcaggtatgtctctcctttcttcttaaacttttagtagtatcccacagctcgcagaataaagttcagactcttctgtttagcattcaaagtcttctaccatttggtttcaaactgccttttctactacatgtattagtatacgctctctttattaccatttctctctccaactaagccttctcccagaaaagaaaaaaaaagggggggtattttttgtttcaactttgttcacattagatttttgtgtttttgttttgttttgtttttgtttttagcttgaaatacccattctctccacttgcaattgaaattggatttaacttttaaggtccattccaagtgttgcctttctccctccattccctggccccatcccaccagtcctaagaatgaatcactcctttttggttcccatagtatatttctcataccattgtttgcaacccatattctagttactggtggatggaactggtaacaggaactagtaattgactagtaactaacttgtcagtctccttacattctgtttttagacttccttgtatccatccttctttccagttgcagcggtcttcctcatattgtgcctttcctcactcctgcctattcttaactctagtggttttgtgatcttggtggaacatgtccaattatctcgtacatattaagaatgaggaagaaaagcaattgacaggaattgatggaatctacttactattagtgtaaataccttacagtttgctttttctttatcctatgtttatatacttattgttttgaaacttattgttttctttatcctgtgtttatatatttattgttttgaaatttcaaagattattttgtcttcattgtgtaagtgtgtgaaatatctagaggcctgggaggacaataaacttgtctagggactcacaaagggttagtggtagagccaaggtttaaacccaaaaccccttcaagaatggcttttatagtcatgtatagagaacatgactttattttggggtgatatttcttgaatgcttttggtagcaccaattagttaaaaaaaaagtccatattgggctacgtcttttacttttgttctatagcacaagtcatcaagcaacccctgggctactttttttttttttttttttttttgagacagggtcttgctctgtctcccaagctggagtgcagtggtgcaatcttggctcattgcaacctccgcctcccaggttcaagtgattctcccacctctcaaatgctttgaatgctaaacagaagagtctgaactttattctgcaagccatggaacaatactaaaagttttagaagaaaggagagacataatctgatctgtgctattcctgatggcaacatggaaggtgagtggaggagagaggaactaacttgggacagggaaactaggaagtcgctattacaaagatacaggtgagggcccggcacggtggctcacacctgtaatcccggcactttgggaggccgaggcaggtggatcacgaggtcaggagatcaagaccatcctggcctaacacggtgaaacccgtctctactaaaaatacaaattcaagtgattctcccattcctctcagtctcccaggtagatgtgactaaaggcgcatgccaccatgcttggataatttttgtatttttagtagagatggcatttcaccatgttgttcaggctggcctcgaactcttgacttcaagtgatctggccgccttggcatcccaaagtgttgggattacaggcgtgagccactgcgcccggccactgggttacttcttatgcaggctgatatagcacttgtggtggtagtctctgtggctttttttgtttgttttttgttcttttggacagggtcttgctctgtcactcagactggagtgtggtggcacaatcatggctcactgtagtctcgacctcccaagttccagtgatcctccctcctcagcatcctgcatagctgggagtacaggtgtgcaccaccatgcccagctacttttctaattttttgtagagacctggtctctccatgttgcccaggctggaactcctgagctcaagggatcctcctgccttggcctcccaaagtactgggattacaggtgtgagccactgtgcctggcctaactcttttcttattgaaagaacaggtggctttgtttagtcagatccacaaatggagatgtttgcaacacttgactagaaagcaaaccaacaatcatttgccctgattcttcttccctgtcttgtttcctagaagcaaccacttgtaactcttttagctatttcatttggtatttcccttcacatttctatattgatatttctagacatttttgactttctgtaatagtagctgaggtcttagcttccttgtactacttcctctcacattcctgtcagtatatttataattttatttttttttgaaacagggtcttgctctgttgcccaggctggagtacagtggcatgatcactgctcactgcaacctccacctcctaggctcaagcaatcctcccagctcagcctcctgagtagttaggactataggcacgtgacatcatgcccagctaatttgtgtatttttgtagagatggggttttgccatgttgcccaggctggtcttgaactcctgggctcaagcagttgcccgccttggcctccccaagtgctggaattacaggtgtgagccactgcacctgtcctatttataatttttattaaattaatatttgatgtctatattattatgactataaatactgtttattttgagccaagtcatggattatgatattttctatttttgtacaattaaagtaatttctcatagttaaaaattaccaaacttttgatttgcctagttatttgtgtacctattaccaattcattcatttgccaaatatttactgagtgcctactataagccaggcatcattcttggtgtttgggatatattagtaaacaaattagacaaagattctttcccttgtgacacattctaattgggagatagacaataaacataagaagtagaatataaagtatgttagaaagaggtgctgagggaaaaaaaagcaggactgttgaggagcatgatgcccttaattcatgattctttatatgtgacctggtttttctctctgaaaacttgtagaattttcacttcatttggatgttctgcaatttaacgatgatgggccaggccctagtgtagatgttcgctttaatttttcatgcttgacattttgtgagcccttgtattcttcagttctgatcttactgctttgttggttgactgaagtaacaatcaatctgatgcaactcaaggagaagggctttggttgttcatgtttggtcatcccatagtatataaagcccttaaattaatgagtttctttgatacaggtattattattattttatttaaaaaaattattgatgtaaaaaattactgatgtcaaagaatattttaatttatttcctatttctggctactggaacttggaatgatgagaggtcttgtttgttattcttttctcattcatttcacttctaaggtttggcagattacatgtctccctggtgctcttgtagacaggaagcctctgggagtcactttcaggtcctggctgccctttcacttttcttagtcttttcatatcttttatcttaccaatatatgtatttttaattgagataaaattcacataatgtaaaattcaccattttaacgtatacaattcagtgttttttaaaaaagtatatttaccatgttgtatgatgttaccactatctaattccagaacattttcatcatccccaaagagaaatctgataaccagtaagcagttaactcccattccccctctcctttcagctcctggcaaccaatattctgctttctgattctatggtcttgcctattgtggacatgccacttaatagtatcacataatatatggcctttagtgtctgtcttctttcacttatcataatgttttcaaggttcctacatgttgtgcatgtattagtactataaaatgtttttaaatcaggctctgaatatttgatttttcggtatccagagaaaaattctgcatttattatctttattttgattttaatactggcctttaatttaccttttcacaaaccatttattggatataaaatgatattggataatttttcagtatgcattatttatttatttttttagtatgccagtactgaggttgatggagagcgttacatgaccccagaagactttgttcagcgctatcttggactgtataatgatccaaatagtaacccaaagatcgtgcagctcttggcaggagtagctgatcaaaccaaggatgggtaagtatcttcatgcattttctgaaaactaatgttctggaatatattgttaaaaatttaaaaaaccagctgggcacagtggctcatgcctgtaatcccagcgctttggaaggctgaggcgggcggatcacctgaggtcgggagtttgagaccagcctgaccaacatggagaaaccctgtctctactaaaaatacaaaattagctgggcatggtggcccatgcctgtaatccccagctactcgggaggctgagggaggagaatcgcttgaatccgggaggtggaggttgtggtgcgccgagatcgagctgctgcacttcagcctgggcaaccagagcgaaactctgtctcaaaaaaaaaaaaaaaaaaattaaaaaacccacaaacttacctacgggtatctagaattttaatattagtaaacatgtaattagtaattaccaagttgctcattagtaattagaaaatatgtttttaaaataaatatattattattatattttggggatacataaatcattatgaaaaatgtattcaggctgggcgcggtggctcacgcctgtgatcccagcactttgggaggccaagtgggtggatcacgaggtcaggagattgagaccatcccggctaacatggtgaaaccccatctctactaaaaaaaatacaaaaattagccagacacggtgacgggcgcctgtagtcccagctacttgggagcctgagataggagaatgtcatgaacccaggaggcagagcttgcagtgcgccgagattgcgccactgcactctagcctgggcaacagagcgaggctccatctcagaaaaatgtatttaaaaaaaattttgttgtttttaaatcaaggtgtagcactgctgcatcaatattaatccaatgttaaaaaacagaggagctgcaaagagctaaggcaataaatactggcatcctatatttaaagcatcttgtagggtagctctgtgacttacgggttagtgtaatggtcttaaaaaagagattaggcgctctccctctccctctccctctccccacggtctccctctccctctctttccatggtctccctctgatgccgagccaaagctggactgtactgctgccatctcggctcactgcaacctccctgcctgattctcctgcctcagcctgcgattgcaggcgcacgccgccacacctgactggttttcgtatttttttggtggagacggggtttcgctgtgttggccgggctggtctccagctcctaaccgcgagtgatccgccagcctcggcctcccgaggtgctgggattgcagaccgagtctggttcactcagtgctcaatggtgcccaggctggagtgcagtggcgtgatctcggctcgctacaacctccacctcccagccgcctgccttggcctcccaaagtgccgagattgcagcctctgcccggccgccaccccgtctgggaagtgaggagcgtctctgcctggccgcccatcgtctgggacgtgaggagcccctctgcctggctgcccagtnnnnnnnnnnnnnnnnnnnnnnnnnnnnnnnnnnnnnnnnnnnnnnnnnnnnnnnnnnnnnnnnnnnnnnnnnnnnnnnnnnnnnnnnnnnnnnnnnnnnnnnnnnnnnnnnnnnnnnnnnnnnnnnnnnnnnnnnnnnnnnnnnnnnnnnnnnnnnnnnnnnnnnnnnnnnnnnnnnnnnnnnnnnnnnnnnnnnnnnnnnnnnnnnnnnnnnnnnnnnnnnnnnnnnnnnnnnnnnnnnnnnnnnnnnnnnnnnnnnnnnnnnnnnnnnnnnnnnnnnnnnnnnnnnnnnnnnnnnnnnnnnnnnnnnnnnnnnnnnnnnnnnnnnnnnnnnnnnnnnnnnnnnnnnnnnnnnnnnnnnnnnnnnnnnnnnnnnnnnnnnnnnnnnnnnnnnnnnnnnnnnnnnnnnnnnnnnnnnnnnnnnnnnnnnnnnnnnnnnnnnnnnnnnnnnnnnnnnnnnnnnnnnnnnnnnnnnnnnnnnnnnnnnnnnnnnnnnnnnnnnnnnnnnnnnnnnnnnnnnnnnnnnnnnnnnnnnnnnnnnnnnnnnnnnnnnnnnnnnnnnnnnnnnnnnnnnnnnnnnnnnnnnnnnnnnnnnnnnnnnnnnnnnnnnnnnnnnnnnnnnnnnnnnnnnnnnnnnnnnnnnnnnnnnnnnnnnnnnnnnnnnnnnnnnnnnnnnnnnnnnnnnnnnnnnnnnnnnnnnnnnnnnnnnnnnnnnnnnnnnnnnnnnnnnnnnnnnnnnnnnnnnnnnnnnnnnnnnnnnnnnnnnnnnnnnnnnnnnnnnnnnnnnnnnnnnnnnctgtatatatggaatcgccaagatgtcaacattcttgactttaaaactatcaggaaatagagcagccttagcacaacccacaaaggacacagcggctaacaaagaaaacaaatgctttagttgacatgtagtgaaaaagcccccccccccggccagccgccccttccgggagggaggtaggggggtcagccccccgcccggccaaacgccccgtccgggagggaggtgggggggtcagccccccgcccggccagccgccccgtccgggagggaggtgggggggtcagccccccgcccggccagccgcccggttcgggaggtgaggggcgcctctgcccggccgcccctactgggaagtgaggagcccctctgcccggccagccaccccgtccgggagggaggtggggggtcagccccctgcccggccagccgccccgtccgggaggtgaggggcgcctctgcccggccgcccctactgggaagtgaggagcccctctgcccggccaccaccccgtctgggaggtgtacccaacagctcattgagaacgggccatgatgacaatggcggttttgtggaatagaaaggggggaaaggtggggaaaagattgnnnnnnnnnnnnnnnnnnnnnnnnnnnnnnnnnnnnnnnnnnnnnnnnnnnnnnnnnnnnnnnnnnnnnnnnnnatggttgccgtgtctgtgtagaaagaggtagacatgggagacttttcattttgttctgtactaagaaaaattcttatcctgttgatctgtgaccttacccccaaccctgtgctctctgaaacatgtgctgtgtccactcagggttaaatggattaagggcggtgcaagatgtgctttgttaaacagatgcttgaaggcagcatgctcgttaagagtcatcaccactccctaatctcaagtacccagggacacaaacactgcggaaggccgcagggtcctctgcctaggaaaaccagagacctttgttcacttgtttatctgctgaccttccctccactattgtcctatgaccctgccaaatccccctctgcgagaaacacccaagaatgatcaattaaaaaaaaatttttttttggaaaaataattgaagctttatgttgaaaaatatgaggatgccaggcaagtattccactttataggtcaaattctgagccaataatttttaaaccacactaactggagatccatgttttgttttgttttggtctacattaaaaaaatattttatatatatgtatataatatatatattttttgagatggagccttgctctgttggccaggctggagtacagtggcatgatctcagctcactgcaacctccacctcctgggttcaagtgattctcctgcctcagtctcccaagtagctgggattacagatatgtgccaccacacctggctgatttttgtatttttaggagagacagggtttcaccatgttggccaggctgatctcgaactcctgacctcaagtgatctgcctgcctcggcctcccaaactgctgggattagaggtgtgagctaccatgcccagcctttaaaaattggtatatactagttgtataattaaactatatattttattcaaagtttataaaaatggtgttatttactgctattatcaaggatacaggcatttctttttttcgaaaaaatatttcacgggaaaagcctcattttatgttgaataatctgagcagaacgagttccaaataaccaagtatatttcttccattcattcaataggtattgagtgcctgctatgcctcaggtactgttcttggtgctggaattattaatatatcagtgaaaaagccacaaaaagataataaaaaagtgaattatggtatgttagaaagctgtaagtactatgatgaaaaataaattaggggagagtttagggagtgatatttattaatttatttctctatttatttggcaaacattaattgaacagccattgtttgtcaggcactgttgggccttacaaatacaaacataaattaaatgaggcttttggccttcaaaagaaggtaatagcttagtgagaaagaaaatgactaaacaaaggaaaaaagtaacacttctgaaatgaggtgctgtcatagctatatgagaggaatagagggaacccaagaaagcatggttaactgttttgggtggtcaggacagcatcacagaagaggtaatgcttgagtgaaatctggcaggatgagtacaagcttgttagtagttggataagtagggacgagaattccaggaaagggaacaggaacggcatgaaacattaaggggcgtgtgtgtgcgtgcgcatgtgctcacattagtgaatggcaatggaggagggttgtgttgcaagtactttgatgtggctgtggcattgctttgttgctgggggagatgtagttggagtggctgaaggcttttgactctgtcttgcaggtatttttagcctggtagtgtatgggtgtgtgaaaagacagaaataacaaggggcatcttgctagagtgtcagtttactcaactcaggggagaaaagcaatcattatttgtattaaaatcatatatggctgtattatggagtgaatgtaatagttgcatgaattagataaagacaattttggcttgttatggcagtttcagtctacatctccaagcctccagggcctaggctctttctcctacctgttgaggtgcttgtgtgacaaactttgagaaactaggcagtaagtagtctaaaaattatttccattaccacagatgtaaacagattttagaaatggtgggttggaatgggacaagactcgcatgcaatagaatcaatttaggtagctattgtaataaagtagaaagattggtgtctaagttctttgagtccaggattagtactgtattcagttttattgtcccatagaaccttgcacagtgtgtgaaatttactatgtgttcaacaaatatttgttttggaaagattttatatcatttataaatggcaggtattgggaaacttgtataccttttaggtctactctctcaaaatatatcaactgataaatcactgtggatcattcactcataggatctttcaataatgattagacaataaagcaaatgaaaattaattatacctatcataagtccttcatcagaattattaaaggtaacatatatatttagctcttttagaaattatcagagtatttattgttagtaatttggtctaagacctgatttcagaatatccatatattttcaaatgtttccttttatgaccatctgctctattctatctcagtagtgtatcttctttgaagcttcatgtggttctcctaggctgagttgcattgttaaagtaggacattttcttttcttttttttttttttgtcggagacggagtctcactctgacacccaggctggagtgcagtggtgtgatctcagctcactgcaaccactgccttccgggttcaagtgattctcctgcctcagcctcccaagtagctaggattataggtgcatgccaccatgcttggctaatttttgtgtttttagtagagatgaggtttcaccatttggccaggcttgttgtctcgaactcctgaccttgtgatctgcccgcctcggtctcccaaagagctgggattgcaggcataagccaccgcacctggcccatttttcttcttataatcatctttttaaaaagatattctctactgggcacagtggctcacacctgtaatctcagcactttgggaggctgaggcgggaggatcgcttgaggccaggagtttgagaccagcttggacaacatggtgaaaccccatctctacacaattaaagaaaaaaattagccagttgtgatggtgtgtgcctatagccttagctacttgggagagtgaggcaggaggattgtttgagcccaagtgtttgtggctgcagtgagctataactgagccactgcactccagcctgaggggcaaaatgtgagattctgtcttaacgaaaaagaaaaaagatattctcttttctcccctctattttctaccccttaacccagggcagtgatgaaatattagaatagcttacttggtacgttgtttcctgccccaaaatgtgttccttggttctatcatagttttctgatgatgagtcctatagatatgttatgtgaaatagcaacatataatattgcttataaccactcaagaccaagtctgaatgagtggagctagtatagacaagttcaagtgatttggttaagtgtgtgagaaaaattggtctaggagtggttgaaacacgctcttttgtgctctgcaatccttcccccatgttttccgggatgttaactgttcctctctcttgttccccatctcctttcccccagtagatagtaaaataagtaggagtgtttggatatgggtgcttgctgtagaaagccatgtaacatacaaaacagcattatatattataaatagcacaatcagttgtctaaaagtaaaagccattagccaagtattatttgtgggattgtggcttaaactttgaagttctggtgtataatgaaaagcaaaatgattttatgcatttaatgcagatctcagagactataattgtgtgatctaatctaaaatatttagactgttgcttacttgaaattgtaacttctagaaccatagtttctatattcagtcctagtcagaattttatctggaggttctgttctcctgtgatgtagaaaactggtgttcttttcttctactttttccccaagtgttttcctttatgttacacaggcatatagaggaaccttttatgcagaaatcttgattgttttacaaattataaaattaacattaatattttgtcattttattagttcctatttactaaattaaaaaggggcttcgtagaaaatttttaaaaaacacaccaaattcagaaaatatatttttcaaagttataaaatgaatacatgttctttctaaaaagtcagacaatggggtaatacggtaaagagtgaaagtacctccttatccccattacaaggaaaactaatagagtgtgaactaatcagtagtttcttcactcaacagttagtagcttgtggtttgcatatattctattaaagtcttgattgggcccttctagcaataaaggaatccatggcaggataaagggaaaaggagccttaaaaatattctggagccaggcatggtggttcacacctatgatcccagcactttgggaggccaaggcaggaggatctcctgaggctaggagttcaaaaccaaccggggtaacatagcaaaaccccgtctatacaaaaacatttaaaaattaaccgagcatcctggtgcttgtctgtagtcccagctactcaggaggctgagacaggaggatcacttgaacccaggagttctaggttacagtgagctctgattgcaccattgctctccagctgggagacagattgagaccttgtttcttaaaataaataaataaataaaattctggaacatgcttgctttatgttagcattgcagactatttcttgctttcagaaaaatattgttgcattataatgcagtaagtatataatgactgtgggcttaaaatagaggagagtatcagagagactgtcaagtggcctatttttctctcattcctcccaacattttattatgaaaattttcaaacattcaagaaagttgaaagaattttatagtgaacacccatatatctaccacctagactaccacagagattatattattattattattttattatttatttttatttttattattattatttttgagacagggtcccactctgttgcccaggctggaatgcagtggtgtgatcatggcttactgcagcctcgacttcctgagctcaaatgatcctccctacgtcagcctcccaaatagttgggaccacaggcgcctgcctcatgcacagctaatttttatttattttggtattttttgtagagatagggtctttctatgttgcttaggctggtcttgaacttttgggcttaagcaatcctccccctttggccttcccaagtgctgggattacaggtgtgagccactgtacctggccagattctactattaacatctgactattcttgctttttcatatatccatccatccctctatccttccatcaatccatcttttttttaatacatttcagagtaaagtgcagccattgatatagttcttaaatattttagcatgcccattatttactagtgttttttgttttgagggttttttgttgttgttgtttgttgtgagacagagtgtgtctctgttactcaggctggagtgcagtggcccgatctcggctcactgcaacctctacctcgcgggttcaagcaattctcatacttcagccacccaaatagctgggattacaggcatgtgccactatgccaggctaattttttttgtatttttagtagagatggggtttcaccatgttggccaggctggtctcaaactcctgacctcaagtgatccactgacctcaagtgatccacccgcctcagcctcccgaagtgctgggattacaggtgtgagtgaccatgcccagcctttgagtgtttttctttaaatgtaggactcgcacatagtaagaaaatgtaaatctcaaaagtgtatttgctgagctttgacaaatgtatgcacctaggtaacctcaagtgactttttttattgtgttaaaatatacataatataacatttaccattttaatcatttttaagtggacagttcagtggctttaagtgcattcacattgttaggcaaccattatcatatccaaggccaggcgcagtggctcatggctgtaatccgagcactttgggaggcctaggtgggcggatcacctgaggttaggagttcaaaatcagccatggctaacatggtggaaccccgtttttactaaaaatacaaaaattagcctggtgtggtggcacgcacctgtaatcccagctactcaggaggctgaagcaggagaattgcttgaatccaggaggtggaggcggaggttgcagtgggccgagatcatgccattgcactccagctggggcaacaagagcaaaactccgtctcaaaaaaaaaaaattgttgtatccatttgcagaacgtttttatcattccatactgaaaccccataccaattacataatgactccccattctctttccttccactccaaccagcccctgataaccagtactccacttattgctactattttagctatctcacataggtggaacaatataatatttgtccttttgtgtctgccttatttcatttagcataatgttttcaaggcacatctatattacagcatatgtcagaatttcattcctttttaaggctgaataatgtactcagttgatttattttttagagatagagtctcactctgtcacccaggctgaaatgcagtggcacaatcacagctcattgcagcctcgaacttgtgggctcaagcgatcctcttgccctggcctcctgagtagctaggactacaggcatgtgtcaccataacaggctgatttttgactaatttttaagttgttggtgcttttgtgtattttcatgatacatctgaatatatatctcgtgatatatctgaatatatctgaaggtaactgagtattgagggatggctgagtattaccccaatagcttcttataatagtggtctacttactaatgccagatactctttctggttttcaactatagctttaaaattgggaaagggttaggagatatacagtaatggaagaacaccaaattgaaggcaggagttaggagtctttaagtagactcactgatttgctgaatgtctttgaggaagatcacttaacgtttgcctttctaagggtccttctggctccaaagttgcatgaatatatgatttgtctttttgaatatgctgacagacaaaatgtagatatttagtaaattccatagactttctattttaaacaaagggctacttaattggaaacctatgtgacaagagtctcaaatccacaaggacagtgtggtctgtagatagataactgatgagccctgtttggttgcttttctgaaggagaaagactgcttgtcttcaaggggctggtgctacttgggaccggaaacctagtgttgttcacacttgcagtttatcaaaataaaccagaaaaactgagtatttatgggaaatcttgtgatttcttaatgtcaactaatgcaactaaaaaacagtactttgcatgccaaagaaaacacatctttggaccaaattcagtctgccagctgatagtttgtgacctttgctagttaaggaagaagtttttggcctcttctcataaatatagaaggttttactactgagcatgaaatttgttttaaagctacgtattctgtatttcagggtaggtgtattttttatgtcttgatgctattttgtagaaaccaatatgttatgcctttttaaagaaaacccataatcagcctatttttatttttaaaattattggtcagtctgtttttttcttcctcaaacagaaattgcatgaaaaatacactatagaaaatccttgtatcaattaacacattttgaaatatatagagtaattaacattggacaatcaaggaaagattagtttcctaggaaaatacttcattgaagaccagtctgcagatctgtatgcatatgagacacatttttataatgctgttacttggacactcattactaatgagcagcaagatggtatggaatctttgtagcaagcttgctatgaaagatctagtatatgctggctttgtaaggtcactgaaggcaatttctgtgtagttttgaccactggttaattttataaccttgagtataataggactcattaagttctagaaacccaacatatgagtttcccccactttttgttaagttttgttttgttttgttttgaaatgggtctcacttgggtctcactctgttacccaggctggagtgcagtggctattcacaggcaccagcattgcatactacagccttgaactcctgggctcaagtgatcctcatgcctcatccttttgagtagctgggactacaggttcatgacattgcacctggctcccaccttttttgttttgatttttccttttaacatttttatttaaaaaaaatttttttttaaacagggtctggctctgttacccaggctggagtacagtggcacaatcttggctcactgcaacctctgcctcctgggcttaaactgtcctcccacttcagcctcccaagtagttggtactacaggtgcacaccaccacacctggctaatttttgtattttttgtagagatggggtttcaccatattgcctaagctgctcttgaactcctgagctcaagtgatctgcctgcctcagcctcccaaagtgctggcattacaggcgtgagctactgtgccctgcctctaaaagttttattttaatttaattatttattgagacagagtctggtctgtcgcccaggctggagtgcggtagcatgatcatggcttattacagcctctacttcctgggctcaagcaatcctcccacctcagcctcctgagttgttgggattacaggtgtgtgccaccatgcccagctaattttttatttttactttttgtagaggtggagtctccctatgttgcccaggttggtcttaaactcctggactcaagcaatcctcctgcctcagcctcccaaagtgctgggattacagatgtgagccactgtgcctggccaaaatttttattagtgatgtttcaaacatgtataacacagagaataatgtaaattctatgaattcatcacctacttttaatcattaccaaaataattatttcgtttatacctccatctcttctccatcctctggattattttgaagcaaactctagatgatgtatttcatttgtaagtgtctcactgtgtatctctaaaagataatgcttaacaacaaccaaaaaaacctcctagaaacattgatttcttaatatcatcaagcatttgtattatattggtatttccatttcccggattatcttgtaaattaaaaaacttttttttttactttgtttaaattggaatccaaataaggatgtatattgtgattcattgttatatctcttaggtcttttaagattgagattccctgtgcttgcctcagcagcacatataataaaattggaatgatacagagattagcatggccccttaaaaaaaagaagaatcctcttcatagcttcattaaaaattatttttctgcagctatggaatgtttcttctgtcatttcctacagtctgcatttatgtggtggtagtgaacatgttcctttgtttgttgtgttttctgtaaattagtgaatagttctagagcagtggttctcaataggggtgattttgctcaccagggtatatttggcaatgtctggagacatttttgctggtcacaacttggggatgctattggcatctagtgggtagaggccagggatgctgctaaacatgctacaaagcacaggaaacccccacaacaaagaattatccaacttaaaatgtcaccagtactgaggttgagaaactgatccagagacttgatcagattcaggtttaattatattttgcctggttctctctcttcatgatgttaggagctattgattattgcccagtttcattgattttctaggggcttacaaaagggtgatattctaattctcctttccttccttatctgaagtacctctataaaaacaaactaccctttatcaattatttggttaccctgagctacagtttatatagtaaaggcagattaaatgcctgatgctttccctttcttcaccagccaatggcgttttatattttattccaggttgatctcctatcaagagtttttggcatttgaatctgttttatgtgctccagattccatgttcatagtggctttccagttgtttgacaagagtggaaatggagaggtgacatttggtaagggaaaaagaagattataagtgataagttaatgatgctggtccagtcttcaattgctgaatctagtaactaatatagattactgcttatttgggatctgacccataattgaatttcctaaaaggatttatgcagataatgatggctttattttttcaaagcattaaactgttgccaaagatgaagaagtgtagtaatgctgttgctttagctcattgagtcactgacactttcacattcctaaaataaatggtgtaagattttcttgttctgggccagcctgggcaaaattccttacaaggtcgattttgaacaacatgaaacaattttctcattctttaagtgatttttagatagggagttcagagcttctcttgtagcatccttggaaaattgctactatgtcattgtaacaccaagaatggaaccgaaggaggatatcaaggcaaaattagttagtgttctctgaacctgaattttagatttcagttttaggaaagaggctagaatattaaaattgccatctgacatgaatgtagaaatttatttaaatcctctagtagacacaaaatctaacacactgttgatgtttcacaggtgtatacactaggatttttatttgtaaccatatattaaagatacttttttacagaaattagtatatgtttagtaaaagtattggctaatttttcttgcaacaattttttcaataaaagccatgtagtagttcaaggaccttgagcactgcccccacctttttaaagattgccactgtttttgttgtggcaaaaaacacaagataaaattactactatcttaatgattttaaatgtacagtttagtagtattaagtatatccacaacgttgtgaaagacatctccagaaatttctcatcttgcaaaattaaacttaagcccccttttatagtgtgaattggcatggatatttgtagaaacacccttgaaaatcaggctttccctgagctatgacattaaacacttattcactattgtgtttgagttataaaatagatgtcctttagttaaacttgaaggaaaaattatcactgcaatggtcaaagtggtgagaaagtacaggtcagtcaatcagaaggatcagtagtgccttggctgtaattttggtggacacattttctagcgtgacattgattgttttcttcttccttctgcccattgactcaactatcttctgtatgagaagactttccaaaaaaatgctatgcagagttttttgttttgtttttttttgagacggagtcttgctctgtcgcccagactggattgtaatggcgtgatcttggctcacggcaacccctgcctcccgggttcaagtgattctcctgcctcagcctcccgaatagctgggattacaggcatgcgccaccatgcccagctaatttttgtattcttagtggagatggggttttaccatgttggccaggctggtctcgaacagttgacctcatgatccgtctgtctcggcctcccaaagtgctgggattacaggcctgagccaccgcgcctggcctgctatgcagagttatttagatttttgcatataaatcttggcatcctcctcctttggagcaagcttcgaccatcttgcctcctgaagaatgttgactttcctcagaaacacctagattctgtagtttaaggcacaaaccctccatcatctcattcagcattaaccatgcactactagcaatgctgcattttccattttcagtaggtatcacacatgctcacatatctcacaaatgtgatgcagaaatgcttggaaaataactggattcagatgtctgagttagtgacagtgccctgtgcttatatcctgtgtgcattaagaattagatctcacaatcaaattctaatttttgtccctctaccttgatatcatggttctttgtgtctcctccatttaattacttttcccagtttcgattattataaaattagtaactcaagccacttcatccaacagactgtcaagaccaacttaacaataagacacatgccattgttgataaatagattaaaatgagtgtaggaagtagctaagtttatatatgccttatttaatgtaaatgaaagcttgtagtcattagatctcaactttagttttttttttttggaggtggagcctcactctgtcacccaggctggagtgcagtggcgtgatcttggctcactgcaacctctgcctcctgggttcaagcgattcttctgcttcagcttcccgagtacctgggattacaggcacctgtcaccacgcctcgctaatttttgtatttttagtagagacggggcttcgcccatgttggtcaggctggccagtctcaaactcctgacctcaggtaatctgcccacctcggcctcccaaagtgcgtgagccactgcacccaggcgtgagccactgcacccagccaactttagctttttataggtcttctgtttttctttcaaactatgatttatgaattagaatttttagaaatatagttaggattaaacacaaaccagttttagtttttacggtaccaggtataaactgaagaacatatgagccctcaagaatcttgctttcattcttttcctccataatctagagacaggaatattattatggaataagaaaaagatgaagccaggtgcagtggcgcatacctgtagtctcaactcccaaaggagtgatttcagctcctcgggaggctgaaatgggaggatctcttgagcccagagtttgaggccagcttgcacaacatagtgatacccagtctctaaaaaatttaaaacattttttaaaagctgtaccctgtttctgttctggattccctggctagctggttggctcttttgatggtgctcacctatttcctaaggactttgaccatttcaccttctgtccctgccttcctagttttaaggatccactttgagacaaattttcttaagtagaatgagagaaatgataaaagaaagtttcctttcatatttttaagagggaaaatattgaaactgttgtagcaaatgccatttaacaagatttctaggcactgcttatttcaagccatattcaagactacagaatttatgcataaggaagtaattaacttggagtttatttttataggattttggatctggggtaaaggtcagttttcatgtttgtaaccacttaataaaatgaattgtgcttatgtatttataggcacatgtttaggtaaaaggaaattttagatccattctaaatagagttaaatccttttcaccaaatggccttctgttttctagtttggagctatttatagttttctcttgtgcacatgagagaaagttggaagacaatattagctgcaatgtgtaaggaagtggagaaaacctgttatgctatcagcatctcttgtagactatgatgataatgttatctgtgtacttgtatatattctcatttatgctttttttagatatgattttatacacatcaaattatatacttaaactgtgtgcatctttgcaagtatttatataagtagtaatattgaacatttacttgagtgtttatataaggttttttgttgttaaagatacctctgctctggggagaggacttagattgaggccttggaaatccatttcagaacgtgaaaactcaggaaagggttctggagtttttttaagagtgaataaaatattagttaattgtttcctctttgatgtttctttaataaaacttctaatgcatgccgtggataattacttaatggtttgtatatctgttactgtcaggtggcatgagccttgtagaggctattgcatgactggtgtgtgctagctacagtgtaagtttgccttggtctcaccattgtccacaagtgtactggagatcctgttcagtactattagattcaggtaacctagataagcagttatactacattgtgttgtcagtagctgccatgcatttaaaatccaaattgaaaaaaaggccgggagcagtgactcatgtctgtaatcccagcagtttgggaggctgaggtgggcagactgcttgagcccaggagttcaagaccagcacgggtgacatggtgaaaccccatctctactaaaaacacaaaaattagccgggtgtggtggcacatgcctgtagtcccagctactcgggaggctgaggtaggaggattacttgagcctgggaggtggaggttgcaatgagttgagattgtgccattacactctagcctgggtaaccggagtgaaaccctgtctcaaatgaaaaaaaggcctattgccttactaaagatttaatccttttttttttttttttttaaggggccaggcgcagtggctcacgcctgtaatcccagcactttgggaggccaaggcaggaggatcacaaggtcaggagtttgagaccagcctggccaacagggtgaaaccctgtctctactaaaaatacaaaaattagccgggcgtggtgggcacctgtaatcccagttacttgggaggctgaggcaggagaatagcttgaaaccagaaggtggaggttgcagtgagctgagattgcgccactgcactccagcctgggtgaaagagtgcaactccgtctccaaaaaaaaaaacaaacaagaaaaaaccacaacaaactgttgtctgttaactaacaaaatgagtatgaaacatgttatatgttctgagttctctattaacatcaacattgtgttccaaatttggtgtttgcctaggaatggacactcttcaaagtaaacttttccaaggacacatcctcaccctctgactgaagaaacctcaaaaagcagagattcctttaaatgtagtactatgtttgaccattaatacatatagcaaataaaaatgtgttccatttgtgcctctgaaataggctgtttttccctgaaggagagaataaattgggatgggttaggcacaaccactgttattattttaaagagccaggagatggaagtgtagttatgaaaaatgtaccctttctcactggaaacaaagctatagacatgcaataatatgaagttctatggtggccaggtgcagtggctcacgcctgtaatcccagcactttgggaggccgaggcgggaggatcacctgaggtcaggagttcaagaccagcctggctgggccgggtgcagtggctcatgcctgtaatcccagcactttgggaggccgaggcgggtggatcacaagatcaggagtttgagaccagcctggccaatatggaccagcctggccaatatggtgaaaccccatctctactaaaaatacaaacaaattagccgggcatggtggtgcatgcctgtaatcccagctacttgggaggctgaggcagaagaattgcttgaacccaggaggtggaggttgcagtgagccaagatcaggccactgcactgcagcctgggcgacagagcaagactccatctcaaaaaaaaaaaaaaaaaaaaaaaacaaagaccagcctggccaacatggtgaaaccctgtctctagcaaaaatacaaaaattagccgggcgtggtggcatgtgcctgtaatctcagctacttgggaggctgaggcaggagaattgcttgaatctgggaggcagaggctatagtgagccaagatcatgccactgcattccagcctgggtgacacagtaagactccatacccccacccccaaaaaaagggaattctatggcggccaggcatggtggctcttgcctataatcccagtactttgggaggccgaggcaggaggatcacttgaggccaagagttcaagaccagcctgggcaacatggtgaaaccctgtctttactaaaaatacaaaaaaattagccagttatggtggtatgcacctgtaatcccagctacttgggaggctgaggtgggataatctcttgaacctgggaggcagaggttgcagtgagccaagatcacgccactgggccgggcacggtggctcacgcctgtaatctcagcactttgggaggccgaggcgggcggatcacgaggtcaggagatcgagaccatcctggctaatacggtgaaaccctgtctctactaaaaatacaaaaaaattagctgggcatggtggcggatgcctgtagtcccagctacttgggaggctcacgaatggcgtgaacccgggaggctgaggtcagtgagctgagattgtgccactgcaccactccagcctgggcaacagagcaaaactccgtctcaaaaaaaaaaaaaaaaaaaagatcacaccactgacttcagcctgcgtgacagacagactttcataaaaagaaatgaaaattctatgataataaatatatagcttaatttggtaagaagtagagcttcacctgagtattcaaattaaatcaggaagattttttgatttttttttttcttggtgttgctttcggatattgcagagaagttttttgttttttgcttttttttttagtactcaaggctattagagtagcttaagagttcaaggtgaaagaaaaggtggagtgttattagtttttatgctgtttgatgatagactgttgaagtgtctagcttcaataataatagtatgtatgtatgtatgtatgtatttatttattaattttgagacacggtcttgctgtgtcgcccagggtggagtgcagtggtgtgatctcggctcactgcaacctccacctcctgggttctagtgatccttctgcctcagcttccctagtagctggactacaggcatgtgccaccacgcccaactaattttttctatttttagtagagacagggttttaccatgttggccaggctggtctcaaacttctaacctcaggtgatccacctgccttggcctcccaaagtgctgggattataggcgtgagccaccacgcccaaccgatagtctttaaatatgaactcatctttcctgagaaatggacctttacatatatttgacagcaggactactctattgactgtgcagtagtcccttctagaggtaggtaaagggctaatagaaatactttctctcagagaaacaggaggtcattcaggaaactaatgaccatctgagaggagaacccagaagtctgggactgagtctacatgccatgttggttgggacttcctctacaagttcctgttgttggtctttttgttgttgttgtttgttttcctttgttttcttttttggcttcccagttgttcctcctctttcctcccaatttttccttcactgaaaaactcttcacttctacaagtctcaccattgtttttgttcagctatgtacaaggatattcaccattcatggtgggagtcctaaaaacctctctgacttcactttaagaactgtgcaggtgaaattcagctactgaggaacttttccccctgacaataagaatgtttggtctcaagcctataagttggttgtagtggctcctgctgggctggaatccttggaataaggatgtcgttgggctgatggtaggtgggctgtgtcacagggctgatggcttgtatacctacaggaggagttctctggccacaccgttggtacagcagctccttccaggctcattcatggaacaggcatggtggcagtcttggagaagagtgccagccccggtcagaggtaattttgtactgcagaaaggtgaacaagaccagtaggaagtgcccataagaaccaggggagggatgagggtggatgagatggggagacacagtatgggtttctggggaaattaaaacctctgttaagacatatttacataatatatatgatttaatgtgtatttcatctagtccaatcatcataagtgactgatacagctaaactgactaatgttacacatctgtgaacatttttacttaatcacagttgtcaccgttaacctgctctcctgacaaatcattgtgctcctctcctttgagcaaagagaacataatgacaggctacttttgtatttagccccagttcccttttcaatggaagtataaaccatccctttcataagcccatgctctgcaggaagtgaaaaagttgtcttttgttttctatatgtcagaaaactaatggattcctggttctcttagctatgccaacctagtataaaatactatatcgtgattttgctgccaataagatgtgactgtcatttccctttcttccaggccagaactatgctacagaaatagcattcttaaacatggcaaaaaaaagatccttgtttgccactggaaagatgggattctctctgggggtgggtggaacttgctatacagtttcagttagatgtatttggtatatttgagactattggtgttccctttcatgtcacgcaggacctgataaagctgggtaacataaaaacaccagctgtttgagttattacctcatacaagcataagctctccagttctggagcttttatataattttatttatcacattctgataaaagtaaagtggcaatttatgaattggacttgaaaacaatagttctactaattatttctgtgtatctgaatcagtctcaggcacttggtagtagaaacaatgataacagaagagaagtagaatacatctccagaagtgccaaagtaggtttgtaatcttattagttctagtaattatagtagtccatgatgtgtcttaaaaaaaccctaaaagtatcagagtaaataaaccacagcatataataatgatcataacaaaaccatatataaagctgtcaagtgaccactttgggagaagtagaaaatgtccaaatactcatggaaaatgacacttctgtatttggggagatcactatgactaatttagaccatcattttaattgtttcagagacattctaagatcttatttagagatggctaagaagtttatgaaataggatatctaaagtttttattacagagatattttccagatgtaaattatacattataaatttagttcataaatatcctttttgtgataatagaaacttttttttcgagacagagccttgctctgtcacccaggctggagtgcagtggcgcaatcttggctcactgcaacctccgcctcccgagttcaagcaattctcctgcctcagcctcctgagtagatgggattacaggcatgtgccaccatgcctggcttatttttgtatttttagtagagacggagtttcactatggggaccaggttggtctctgactcctgacctcgtgatctgcctgccttggcctcccaaagtgctaggattacaggtgtgagccactgtgcccagccaaaaaaatttttatagataattgaattttcttagcttgaacgcttttgcattttggactttattttacatagtttcatatttgagattctgatattttcttattatataaaagggattcaatttcattctaccattatataagaattatctaggtagtaatatatacatttattatcaaataattatattttaactcttgaaataacctttaaaaggttaccatgaaataactattccctttaataattgtaatgttacttaattaaatatagtaatttgttctaatttgctttccatttttaattttttttaacttgaagatgaaacacttctttttgttagaccttaaaagtaagaaattaattaatttgggactagaaacagctaattaattaagttagatcctaaaaatctttaataatctgctacaatatttgtagccctaaatattttctgctatctttattattttaattgttttgtaaactttaacatattttacaacttcgaagtttcacatagatttaaggatcatcttttgtgttggttagaaaccaggatcccacaaattgctattgggttaattctttgctttttaaatttgtatttatgtaaggtgaaaacgcttgacctattgaaaactttgaagtatttgtccctacttagggaagaaatgaatcctgcattccatttcaaagaaaagatgagaatcccatctccccagtgacatccaatgccttcttccaactttgctgattgctgcaatctattcagagctattatattgactctagactggtagaacgtccagttcagaattcttacattcccctatcccagtagtaatgcttttattaagaaaaagtgtatgtatataaaactaaagggaatccattaaaccatttacaatatgagatcagtatcttatttaaagaatttgcagaaattagagaaaacagcatagttggagattataaaactttaaatgtgtatttactaattctctagtataactgatagctatcgatggcaaaactctttcactaataaaattggctgaaatttgaaaataattttgttcttaagacatcagttaaacaggcttcctgctttcttaactttgttcatgattttttttttttggcatgagcttctaaattagtttatccagtctatgcttgttaaagtaccagtcatttgtgaattgacttttatagtaagtatagaactctgtaagaatgtaaataacgttgttagtgcatgaagacaagctgccagagggttttggttgtatgttacacagtgtgactagttcctatctaaaaattagtgtactgtatttagctctttatttaaaagtgaaacactaatttaacttatcttaaaatattttaatagttcagactaataatcatggattttatggggattttgaagctttgtgtcaagaccatatttttaacaatatcagaagcttttaataaggtgcttgctgctgagctaatgatatgcttttgatagtttttcttatacctatcttcaatagacatattcaggctagtgtgaatgtaataatcaagcctcaatcaaaccatacttagtatgacaaatattgcattatactgtaatttaggtattcatgcttctgataaagggtttaattcgactccttgagaaactgggaaaacactattgattttatacgggatgtaaaatagcagccatttatgatgtaagatagaaatcactttctaattaaaattaaataaagagaaattaagaatctcatggccttatatgcaatggtacatattcttaagtgtaaaattatattttttgtatcagttgtgttcctgcgcatggtttctgggcacacaaaaaaattgcagttattttaatagaagcagatgatattgacttttaaaacttctcttaatttttttctgtaggaacattgcagtggtttaaactacttattccagatataattgatttatttttgttttcccttttaagaaaatgtcaaagaaatttttggacagactattattcatcatcatatcccttttaactgggattgtgaatttatccgactgcattttgggcataaccggaagaagcatcttaactacacagaattcacgcagtttctccaggtgagcttagttttcataacaggtatcaatatatactattcttctgtgtccttcgctttgtatttattaagtttattacaaaaatagaagttctccatggtatttcactcctattttttaaatttccccctcgccagagacaacttctttaaactcttaatagctgtttctttcagtgtttacttccatttatttaaatagtaaagcacttctactttttttctacttttaaatactttttaattgtatcctaactatagaagattagaagctagttctttcacgactgggcgcagtggctcacgcctgtaatcccagcactttgggaggccgaggcgggcagatcacgaggtcaggagatccagaccatcctggctaacatggtgaaaccccatctctactaaaattagccgggtgtggtggcgggcgcctgtagtcctagctacttgggaggctgaggcaggagaatggtgtgaacctgggaggcggagcttgcagtgagctgggatcacaccactgcactccagccttggcgacagagtgagactccatctcaaaaaaaaaaaaaaaaaagctagttctttcacctctctcctctccctctttatcacagacttggacttctgtcccctttcccccaatataattatgtcatgattctgcttagatcagtaatcctatgagttattataattttgtaaatactattggtggctgaagttattatatatttttttgagacagagtctggctctgttgctcaggctggagtgcagtggtgtgatcctggctcactgtaacctccacctcttggttcaagcaattctcatgtctcagccactcaactagctgggattacaggagtgtgccaccacacctggctaatttttgtattcttagtagaggtggggttttgccatgttggccaggctggtctgaactcctggcctcaagtgatctgcctgccttgaccacccaaagtgctgggattacaggagtgaaccactgcacctggcctaaagttattgttcttagagtttctagttttcatttgtttagttttctgtgtactaatactaagtcattctcaaaccttggcccaattattaagatctctttttaatgtgtttaaaacacattaggtattctattaatttcatcttcttggagctctccaggagctttcttttttaaaaaaatttgaggtaaaatttacataaaattaatcatttaaaagtgcacaatttaggccaggtgtggtagctcacgcctgtaatcccagcactttgggaggctgaggtgggcagatcacttgagatcaggactttaagaccagcctggccaacatggcgaaaccttgtctccactaaaaatacaaaaattagccaggcgaggtggtgagtgccataatcccagctactggagaggctgaggcaggagaatcacttgaacccaggaggtggaggttgcagtgagctgagattgcatcgctgcactccagcctgggtgacagagcgagactccatctaaaaaattaaaaataaataaaagtgcacaattgagtggcatttagtacgttcacagtgtcttatatctagttccaaaacatttttatcatcccaaaaagaaaccgtgttccattaagcagtcactttctatttctgctttcccctgagctctggcaacttccagcctactttctgtctctatggatttacctattatggatatttaatataaatggaattgtacaatatgaacttttcttttttttgagacagaatttcgctcttgttatccaggctggtgtgcaatggcgtgatctcagctcactgcaacctccacctcctggattcaagcgattctcctgcctcagcctcctgagtagctgggattacaggtgtgcgccactatgcctggctaattttttgtatttttagtagagacagggtttcaccatgttggccaggctagtctcgaactcctgacctcaggtgatccacccacctcagcatcccaaagtgccggcattataggtgtgagccaccacgcctggccaaacaatatgaacttttgcatctgtttttttttttttccacttagcataatgtttttaagaattatccatgtcatagcatgtatcagtgctttattccttttttgtggctgaatactattccattgtataatatagtataaatatgttatattttgtctatccattcatcagctgatggacctttgagttgttcccaccttatggttattgtgaatagtgctgctatgaacatatgtatacaaatatttgtttgaatacctgttttcagttcttttggctatatacataggagtgtaatttctgggtcatatggtaattctgtttaactttttgagaaaccacctgactgttttccacagcagctgcaccattttcctgttgtttcctcacctgcttcagggccagaagccagactgtgtaagctcactgcataggagtcattctgtgatcacccttcacttttaccttggagaatccatttgctgttctgttacgttgaacctcctgtttgctgcattttatctcttcttttattgcggtttacctatttttggtagaatacttcctgcaatggcttcttgaggaaagtggaataaaatttttttgagacttttcatatgtaaaaacctcttgttccggctgagggcagtggctcacacctgtaatcctagcactttgggaggccaaggtggggagatcacttgagtccaggagttcgagaccagcctgggcaacatggcaaaatgccatctttacaaaaaatacaaaaactagccaggtgtggtggcacacgactatagtcccagctactcaggaggtgaggtgggagaatcacttgagcccagggaggtagaagctgcagtaaaccatgatcccaccactgcactccagcgtgggtgaccgagtgagccctgtctcaaaaaacaaacagtctgggtgttttggctcacgcctgtaatcccagcactttggggggccaaggcgggctgatcacttgaggtcaggagttcaagatcagcctggccaacatggtgaaaccctgtctctactaaaagtgcaaaaattagccaggtgtggtggcaggcacctgtaatcccagctacttgggaggctgaggcaggagaatctcttgagcctgggaggcagaagttgcagtaagccaaggacaggccactgcactccagcctgggcgacagagcgagactccatctcaaaacaaactaacaaacaaacaaacaaatccctcttgttccaccattatgctaagatagtttggctggttattgaattctagtaggagtttattttccttataattttgaaagcattgctcttttgttttctagtttccagtgttgccacagtgccattctcattcttaatttaatcttgaaactttttccactctgactcgggagtgttttaatattttttcttttctttggtgtttatgaaatttcacgatggtattccttggtgtgagtttatttttattcattggtctgggctcttcattcattgggcttttctaatctggaaacttacgtccttcaattcttgaaaattttattacttttcttattctattttcttagtttctaggactattaaatgttacatttatgaccttttagtcttcttttctctcctattttccttctgagccttctattttctatttctgctgtatttctaattttcaggaactctttttggttttctgaatattccttttaaaaaatagcatactgttcttgtttcatggatgcactcttttctttcacttcttcaaagatattgaagacaggtttctttgttgtttttttaaagttttcttcttgcatagtgtctgctttctccacatttatttatttatttttactctttgtttgggtctctgtttttctttttctcttttttttttgagtcagggtcttaccttgtcccccaggctggagtgcagtgacaggatcatggctcactgtagccttgacttccccaggttccagggatcctttcacctcggcctcctgaatagctggtactacaggcgtgtgccaccatgcctgcctaattttttgtattttttgtagagatggggttttgccatgttgcctaggctaggtcttttatttcggattagggaatcagggaaaaattgtctagtctccaatctggaatattagatctggcttttgatgttttggttgctgagtaataagtagttggaggtctcagtgttcaattttgcagaaggactttcagtttactaccttttttcactgtagtattctccctctcaactgtgtgtggtctatgctggttcagagatcctctgttaaactcctcagacagtagacctctagtcttctgccaaggttgggaaagggtggaggccttatttggagtaaggcaggggtaactaactgcttcttaaacagatatccagctaagccccttgttttcagctccaccttcaccatcacttccagaggtaccaatgcagctaataattgaatcttttgggggtcctgtcatgtacattggcttcctttttggctttttctgcttagtttttttgagtccattaagtcagttgtcatttgcttttctgctttctgatcttaaaaatatagttgccatcttctccttttctgttgtctttgtccttgcgtttctgttttgttttgttttgttcttttattgttattttagtggagagtggcattttggaagacggtggagttaaatgtacaagttcactctcatccagtcacactgtttctgaagctctgctaattttcatctcataattagatgaaatgcattttcaagggcataggatctttcccttcagcataactgcctttctttatctttcctttagttctcctatccacctacctacctacctacctttttaacccaagatttatttattttaccttttataagcccacagtattgtttttcttcattaggatgagcacagatttgaaactatgggctttaggtgtgggtatttggaggtgccagtgtttgttctaactcttttccctgttagtgcttatctaactcaccttataaaattctcaaacttgaaaagttgaaaatatatgcatttgagagctgacttttttaaaaaaggaaatgtctgcctgattagtgtttaagattcttccaaagattactttctctctttctctcactgttttccttgcatttacagagtctattttacaatatctattgtaccctgatgttttaattatactgtataaactgagagccgcatatatgtaacttctttttttctgtgtttaacttctcatttttaagtcattaattttattttttaaaatcttttttattttggaagacttcaaatatactcaaaagtagagagaatagtgtaatgaacctcctggacctataaccagcttcaataattaccacttcttggccaatcttttttatctataccctccaccctgcctcctgcaggatcatttggaagccagatgcacatactctatgattttttcatctgtgatccttcaaatacgtatctttaaaagacaaataagagtcctttaactgttgaccttatagaaaacagacaatctattctactaacactactccttcagtgagcattctgcttcatcttgaaggtaaaggtccacatcttctttagtactgagtgttattaataaggctaaattgtacccatggctaccatttgatatttctgggtgattaagacatatagggaagacaaagacataagaaagagatagaaaagaggtagaaggaaagaaaaagatatataagacagggagtgaacctgtgtctacttttgatgctatttaggaatatctttgccatggggaccaatttcaaatccatgtaatgatgtagatggattgaaaattcccacttcatttgaagggtgaagtggttggagctgaggtcatgggaaaatggagtgagttatcacaagtccataggaaaatataattaaataaaaatgatgagacttctataaaaactacttttaatgtcatgaaaagttaaagcaacattaatttgtagtctttgataagtaaatgtgaatgaaaattatgtaatctttaaataatatgtatatacttagatatgactattatttacagagttgcaaagagtgtgacggtggcatccaatagcagcaccattgttatgtttgctaacaggttttttgcatttagtcatggatccccacaacagaaatgctctgattttgacttttgtatagtacacaggggattgctggaacattttgttgtttttgtggatatcacttattacaaagtttggttgcccaatagttcaaaagttcagagatattctggactgtcttacagtttatgagtaacagtgcccagagccagtgatagctgaacactacttttgcagtttgttattcctgactttcattttagaatgactgaatattgcacttaccagttggtagagtttctcactgagtttatttgaaaaatttgtttgaaaaaatggtctctaattcatttatagaatgacagagagagagactttgattgcaacatttaaaattgaaaaactgaaaatgaatctaaactcttaattcatgaagtactctttgatgacaggtaagccttcaagcaggagagataaattactgtatattttaaaggctgaaatgaagcaccaaaaacattattctctgttttcagtaatgaaaacttgtcaagtaaaatctaagggttattttttcctacctttcctttattgatgtgctctcattcattctttttcctgaggagtaatatgtagtacatttttaagaaagctcatgctttttgaaagaaattaaaagttttgttgcaaattcagatctgtgcattgtttgttttgtagtaagtacatgtgtgggaaggatatctgtccttccttcctttccaaaccatgtacttggaatgtgtttaaccagcttaatgccctatttctaatttcctcacaggagctgcaattggaacatgcaagacaagcctttgcactcaaagacaaaagcaaaagtggcatgatttctggtctggatttcagtgacatcatggttaccattagatctcacatgcttactccttttgtggaggagaacttagtttcagtaagtaaaaagcaagttctttaactttctatttcctcaaaccttttgatccattgagtcctggattgcctccagggactcatatgactctcaactattcaaatttcatgcttggttggtagaaagtaaacaggtttgtgtgtgtgtgtgtgtgtgtgtgcatgtgtgtgtgtgtacgtgaatgtatgtatgtgtgtgtgtaatggaggtagaggtgatggtgagttatcttttcccggatcatagttttattcagagccaccatcttgctgtcatctatttccaaattgtttatttccatttacagagtccagttcaagggaaacaagagtttatagacaagggtgagcaattactttttccagtgggcagtaactctcccagacactactgccttcatcttggcctctttccacaccaccgggctcccaaggtcttgctataaagatggctccttcctttgttgccttcagggtgctgtctgccggagggatcatcactggcttctgcagtgttttaataaccatgcccatggcagaaggtatggaggaaatatgtggccatcagcctctgtggctcactcctctctctgccccttcacctgtacattcagtctgtatgcaccagacatagttttttgttctgtcaaactgctaatctctataaagtaatcatctggaccaatagcaaactcatgtcatccacttcctcacatagagtggtgaaactttcctcacttacccgttttcttgtctatgcgttgtacttatgtataagtttttgattactgcttgttttgaatggagggaagccaatgagtgcctttgttgtttcagctgaagatcattatccctgatttagactggggtagaaagatcaacttctgttctttttcttcagtgaatctgaacatggaccatgtcactttctcctacacgtttcacctccttgacaccatcccccactcccctgccctcacctcataccccaaccaaaaaaatgaaagaaggaaggaaagaaagggataaagggagagagaaagagagaaagggagggaaggagagagaagggaagagaaccctagagggaggggctcagtaccttagtgggaagggactcatttaatcttttccaactaggttagatagacctactataatagcctcaattttttgaggctcaattttttatagtttaccaaaagtcaattctaatcctcagaggagtatatgaaaatttgagtccagctttttgggttgctggtatccaaattcaggctaacacaaatataaactgtatttaggttaaggcatgtgtgtgaggggtggtggggtgggatatatttgctcatcattacctacactatttgtaatagacctttatgattaaaattgttacattgatatttacataagcatttctttgcatttttaaaggagaatgttttcaatcatatgggttcctctgacttctggcttggaaatgaggcttttgcaaactatgcaaaatattctcttttgagtttatgtccaagtggtgagcagagaacaaattacgtcttcatcctgcagaggtaatgaaggccacgttgcccgccatctcaggcatgagggagcctcttttgcactattccattgaagacataactcaatagtgaataaattctctccagattttctacattttttggagtttttgataattgtacccttcatgatccgaatttagagtttagcacagactgttaagtattttaattataacagtggccttaaaaattaggaaaagttgatgtaataaaattgtcttaaaatttaaagtcatcagttggtttttgtgtatgtgtgtgaaggaaaaaaacaaggttaaaaagtgttccatagattgtacagtgattttgtttatccaggactagcaagagtttcacagttgagggtcttgaagatcctgtttaaataactattgttttgatctgtgataattatatttgttgtttttgaccttataggtagatgaaccatgaagtccaacttccagatgttactttcttccttaaaacctaaattacatagacttccctgagggcatgcagtgcactgtttcagtgtgatactttccttgtatttatgtactggttgttaacatcattttaacagtgaagactcctttggatcctctttgagaaaagtacagtgtccataaacgtgtttttgtttttgtttgttttttaaactttttgtgttgtcattttctaggcagctggaggaagtatctcacaccaggttagcttctcctacttcaatgcatttaactcgttactgaataacatggagcttgttcgtaagatatatagcactctagctggcacaaggaaagatgttgaagtcacaaagggtaagattttaaaatatacataaataagaatctcagcattttcacttttcttcactgaggcatgatgttgatctaagcttaccactctaaagccagatctagaaagtatgttaccatgtgtatgtatgctttacttgggctccaaaaatccaggtggatttaatgtgatactgaggtcaggaatggaaaagtggctttgacagttttgaaaagaaccttgacccaatctgtcaaacaggtcagtggcagtgtggcagcagcttgtttgtactaggaaggagttgccacagaaagatgagcaagcctactccttttggtgagtggtattaggatgttttgaatgactggagaacacccactttttttgtattataactctggagaacaaagtgaataagcaagataagaggagattctaaagagattgttttattcttgaagttaattcatctgttttgctgttttatcatcttaacattttatcttttaccagccttcagaaatgcatattcttgtatagttgaacttaaatatttaaattcaattttagattttaaaaatgatactaaaatgcctatagctttcaggttatattatagttggtgaaggtagaactttgttatatattaagaatcattcaagattttaactttttttttctctgttccagaggaatttgcccagagtgccatacgctatggacaagtcacaccactagaaattgatattctatatcagcttgcagacttatataatgcttcagggtaagtatttcaataattcttcatgatatttattatagagtagttctaaaatgtgaagcagtggtgtccttttagttcattctaacatgagttttttccatgtatttgaatagtttatattcagaatataaattccaagaaagacaagcagatgtaacaaaggagaggaaagaaacacaggaagacagacagagggagaagaagatggagggaggggaaaggagagaacaagggagagaagaaagaaagggaaggaaaggggagggaagagaaggcgggagtgaggtgagataggaataaggggttgagatgcatgagagagtgaaatgggagaagaaagcaatctgacagagaagagaagggttgtgatagggttcataaagtgggaaagaggctgggcccagtggctcacgcctgtaatcccagcactttgggaggccaaggtgggtagatcatctgaggtcaaaagtttgagaccagcctggcctgtgaccagtcggagactgaagtgaaggctccctgtgtccagaccctgtgtttctttcttctcctctgttacatctgcttgtctttttctcttggaatttatattctaaactattcaaatagactgttcttctgcctcatttccccctgagagacgtgatcttcataaatctttatgggaggcagagggaccaatagtctttcttctgtaactacttcatgctgattggggcacagtccctacctattggggaccatggaactctagcactgctctgtctagtggagatagggtgacttcttgatggccagggcaggcatcatcatctggaactggaagccctgctgcatgatcatttgaagcttaatcgtctctaggtgagaagaaataatctggtaaaaagatgaacaaacatggtccaaaaagtcaatgcaagtataattattaacaatgggctggccaagggaaggagccatgaagcccagcttggtgcccttgaccaggagccctatgatgtggacagctgttgttatattttagaagtcctgtcagctaattttcgagtggcatccctactaatcctgattggttgatataaaaacaacattcttataggaaaagacataagccatctttttgagcagttaggagatccagtctccttctattttgtacagtgactgctgccaaggagtctgtttgattttgtaaggtgacaatactttgggcagtgtcttccaagctgtctggaagatccttggatgagcattggtaataggatagggaagttggaagcctgctaactcctattgctattcctgcagttattcctagccctaccaaaaggggtatgagttggatggctcatttgtgcttggtagttgcagttagaggtataatgagagactggttattgggagctatgttgattttaagggggtaaatatacaagtgtacagcttccaatccagttggctgataaacataagtacaactagttccacacaggagaaaggatctttgttttttaagacaaaaattgttgtctatggtgaacatatgggttagtttgttgttttcattttcccaagtgattaaggtccctgctaaggtggccctggttaaaggctggaaaggaccttgggaagtatcctgagttgccccagcagcatttttccagtggaggtagttgcacttagtgtccaccagcaaccacctagaggtattttcatactggggaaccaaaagacaactagatgtctcaggattagtatggtttttcccaagggaaaatatgaacacagctactgggcctatcttggcagtacttagactgtgtatcctttaaagtgccttgaactaggaatggtttccttgaaaccatacaggtttaccaaatgatgcagtctgggcaactgcatagcttacatgatcatgtgaagggttaatctctagggtgtagctcttaagccaattaattagagctcctttatataacatcacacacacaacacttgtagacaggggaagatctagctgttgttacgtttttctttccctttaatttttttttttttttgagacagagtcttgctctgttgcccaggctggagtacagtggcatgatctcagcccactgcaacctccgcctcctgggttcaagcgattcttgtgcctcagcctcccgagtagctgggactacaggtgcgtaccactatgcctgcctaatttttgtatttttagtagcgacagccatgttggccaggctggtctcaaacttttgacctcagatgatctacccaccttggcctcccaaagtgctgggattacaggcgtgagccactgggcccagcctctttcccactttatgaaccctatcacaacttccacagaccatctatgacgtgcttagattttctgacttgtcctgtatttccctgtttcctaagtaattaagcattctactttaggacaagaatttgccatacaagattctttctcatataaaatttcttttcttcataaccttccttatcataaatacatcttcatagctataactttctttatatctctctttcctactaaagtaatttctgatgcctccaaaagtcaaaaaggtcaggtaatgtgatgcaaaactgagcagagccttagattttgagagggacctgtctgcctacagttcttggggttccatgaggaaaacaggggtttctcctaaaatggggtctgtggcaccttctgtttttcccaaggagtcccaggctcccttaggtcctttcatgggcatcaagagtggcaagaagatagaccagggaaatagtccagtcaactgagaagaaaaacaaaactgttgtaaagatggataaactgaggcacaacgcagtttaaaaattcacgttcacatagagctaggctacgcagctcgctgctcagtcactgatgcacttgtgtggtagctcatggtgtacttcaccaacaggtttcctgccccctcagagcttacaacctgggtttcatttcctgctctacagctatataatttaacagttttcctctcaatgtgttggattctaaccctatatatctcacattttattaatattactgaatcttaaagggagccatgatgtctttaatcctcagaaatattaaacaacctggctgggtgtggtggctcacacctgtaatcccagcactttaggaggccaaggtgggcggatcatgaggtcaggagttcgaggccagtgtggccaacatagtgaaaccccgtctctactaaaaatacaaaaaattagccaggtgtggtggtgtgcatctgtaatcccagttactctggaggctgaggcaggagaattgcttgaacccgggaggtggaggttgcagtgagctgagattgtgccattgcattccagcctgggcaacattatgagattccatttcaagaaaaaaaaaatataaagcaacctgtaaacaaaggagtacatgaggttaaacagtattcaaatttctttatgctttaaaacattgagagagtatattgagaaacacacctaagaaactgcagtcaatctactgtgaacaaaaatttagagaatatctcttcaaaataagctatctagtggtatttatacatattcttacatatatcagcagtgttttacatgcttgtaacgttaaacataattgaaaagtgtcaagattatagggcttatacatttctgtgggcttgaaaatgatgcaatatagattatttgtttctataaagtagtcagtaaaatgtacaaacttctaaacggagtaataactaacaagagagttcatactgaaggtagtaatactaggaacaaaagagggctcaacactgccttcaggagagaaagggtccagattggtatattttctaaaggcttcctccagcctgccataaaacacggctagattttcctccttgccctgtgcaacctcccttactttatcataatttactgccttagttattccctttttcattcctccaaggagagccttaagaaatttggcccagttgttcattcccatgggggtgttatagtcccagttaggatcagtagcggagactgtgtctgggcctgggcaattaccctgagggttttgggcaaataaattgtctgcttctcggcaagtggcctcaaagattcattccttttccaacggggtgcaacaagttgctggaatgaattgaacgtctctctatgagagatgaaaggctaaggtcaaagcttggaacctatctgcaaattttctggggttctctgaatagcttcctagctttttctttacattgttgtatgttatttatggagaaggggacctacactcagaccagcccctcggctcctgctgcttccctaagggatagcagggctatagaggtagttgaatagagtgttcccctctgaatgtgaggggacttagcagggcccttggttttagctcttgggtttgagcctcagaaacacttggcaaggggttatatgggggtggttgccattgcccctgagagacaggtggcccttgcaaaaaggaggtcatccacaatatccggttctgccttagaacctgcccttttgggggcaggttctgggagttttgcagatggttgggttttgatatagggccatgaaggcctgcacatatgggatttctgaccatttacactgccttttgcaaaataggtctaattgcaggatggtgttgtaattaagacttccattgactccccattattcctggctgtctagctaattttggggccatacaatattatggttaaaaaaaatcagatgttttctccttagattgtcagggtcaaattgattccagtggttgagaatgcagccaagtggggaatcaggtggaatggatggagagttgcccatagaggtctggaagaaagaagagaacctagcttatttggtgactcaaattttacctggggcatccccctggaaaaactctgggccttgattggggtcctcaggggtgtccccctttagggccccatcttagtctgtcagatgtctctgaccttagatgggtgatggtaccactttgggaaggttctctccaccactgatgacccactgtgagctttccttttgtccctggatgaaggccttgtcttctagcatccatataatttgataaggccatggtttcctgttccactggagtgatagccatgaactttaataataggaactagaggttggatggatttcttttgtcatgtggattacaggtaatctcaaggggggaaaggtagattttgggcatgaaaaatgaaataatagtgttggctattccactcaggccctcgacaagagagggaatgtttaaaaatccaccaccatgacagtggaccctgtgtaagggcaggccattctataaaaataatctggtgatgacaaaagaaacaagatgtagaatgtattctaaagattgtgggccccaaaagtcctcagcaagttgaatagattgagtaggataagggaagtcaaaacatctaagagatatcctttgccattacaagctaactctttaggagaatttgacataagaaaagagggcttaagttgactgaaacatctgtgagtttgttctggaagagctgccactgccaatttcgtcacatgtagggattagggactttaactaggaaagatagaaaagagtacttccccattctgggcagggcagctatccccattcacttcttggccttcaggtaacaccagagagtggctctggctagttgccctcaattaccaaggatctactaggaaacagcctctgaaagactgaaaaaaagaaaaggactcaggtccctcacccaaaccaggcaatggtggtcaggtgcttccacatggatacctttcagtctcccgggagagtggacctggccagagacctgcagttgccttcatgcttagatgctgtctgtggagggtcccgtgttggaaaagggaaagagagcagaaagggttcccctctgtggagtgtagggagctctgcatggagatagctctagcctgtgccctcaaatgaaggctcaatagagaggaaaagaaaaagagcaaaagcaaagcaaagaaaaataaatccccaaatttgggcttacctcctggctgacttgccaagatatgttaccagtggagggtcttgactacaagttgtccagtttcttggcatattgaacaaagaattggacaaaacgcacaaacaaagcaatagaagacaaaagcatagatgtattgaagcaaaagtatactccacagatcaggagcaggcttgagcaagcagctcaagagccctagttgcaaatcttccggggtttaagtacccattagaggtttcctatcggttacaccctatataaatgaagacttggcccacaaccaatcggaggctgaagtgaaggctcagcccgtgatcaattggaggctgaagtgaaggctcagcctacaaccaatcagaggctgaagttacatcctacgcaaatgaagacttggcccatgaccaatcagaggctgaagtgaaggctgcctgtctccagaccctattctcctgcctaaaaatgggtcaaaactcaaagggttggaaagaacatatcgttggaaaaaaaaaaaaagtctccctcatacccttgttcctttccttcgaggcaaccagtatttatcagatttatgtgtatccttcccagatactttgcgcctgtcctttagataggtatccttggggacacatttagtgggtagggacagtcaatctctatacttttgcttctggcaataattatttgattttaatatctatcactggagtcttaccaaattcatgcactccacattatttctctggagtcttttgctttttgttgatgaaaacagagttaaaaggtttttatttcactaaaatgatctgtgtaaatagggaagtaatgattttaaactatagttcactgttttttgtttttttttttgagaaaagatgattttggcgtgaggagtttgtcagtgtctaacaattctttcctatatttttcctgaaggcgcttgactttggcagatattgagagaatagccccattggctgagggggccttaccttacaacctggcagaacttcagagacaggtatgagtaatctcataaatatgatcaccttaaaaaaatgctgaactagtagactaaataggagctgacagcttctgaatgctgtaaaaattaaaaattactttccagagaaagactttacttagcttaaagattacctttatagaactactgttacccccacttttatagaatatatatatattttttgagatggagtctggctgtgttgcccaggctggagtgcaatggcgtgatctcggcttactgcaacctctgccttctgggttcaagagattctcctgcctcagcctccccgagtaattgggattacaggcgtgcaccaccacaactggctaatttttgtatttttagtagagacaaggttttgccatgttgggcaggctggtcttgaactcgtgacctcaggtgatccacctgcctcggcctcccaaagtgctgggattacaggcatgagccaccacacccagcctatagaatatttttatgagataactagatttatatttgtgttttgttttttgttttgttcagataaggaaaataagagttcaaacatacatgggtttgaccccgttccccttagaattagcattcttttcatttgcctcgtcacatttaaagattagtgttaggtttactttgtatcattaaactgatatttatagggtttctaaaattaaaaaacttccctcaaattaaataaatcattcactgggattgtgccttacagattacagccaggaaaaaaaaagtaattagtgaaaccagaaagaaaaccctgactgttaattacatttttgataaatattacttttggtttttataaatgttaagaatgattaaaacagtagcttctgagtcctataaaattaatacaatcccatttctgattttacaaatactatcttggtaagaaaaagaaaatccatgaaattaccttgaagagtggaatggaacagtttttaataaatctcgttttaagttgaaacttctacttctatagcacttaggaagtttcagtggtagcagatgatcacattgcttttgtgtgtgggtaagggttaggagggccagtcattgtcctcctggtactttcctgctctaatagacatggaacctgtgttcctcataattctctaggagagtgtgatgccatactaggcaaggcgacgtggggagggcatggataaagaagacaggatacagagagagagagagagagagacagttactaaatgtgcatgctatagaaagaggctatgtctgctctttcttcattgctgccacattggtgagtagccagggttggcttgctgttattgttcaccttcaccaaatgtgttaatgaaacatcaagatatgtttaagtgtagttcgctttgggaagacttggttaggaaacctttcttctacttgagctccatggaatgatgattctgcctgtgaaactaattagaatttacagttctactttacataaggaacaagaacattttgtagtcaggttgaagtaaattgaaaatggaaaagaaaccattatatctgcattttgtattaatactttaactgtttgcttgatgtgtaataaagcttcctacagattaaaatatgttgtaactcattgcaatttagcttcttttgtatcagaaaaactcttttatctgctgccatcaaagtttatttccaggctgggtacagtggcttatgcctgtaatgccagcaatttgggagcctgaggcaggcagattgcttgagcccagaagttccagaccagcctgggcaacatggcaaaaccccatctctacaaaaaaaaaatgcaaaaaattagccaggcgtgatggcgtgtgcctgtagtcctagctacttgggaggctgaggagggagaatcacctgagcccaggaagttgaggttgcagtgagcgtgactgtgctactacactccagcttgggcaacagagtgagactctgtcttaaaaaaaaaaagaaaaaagtttatttccattaggaggtctcagatcctttaaaaatagatggatttatttcaattcagtgattttaaaaaaataaaattttataaaattatgtttaataaaaggaaagaatgtgaaaaatttttaataaaattaagagacattgaaatatttaaagagctcttactgaatttaattttattttttgtagcctatacatctgtgaaaatttgctcttgaattttgaaaaattgcatttcaaaagaagatattttgcagtgttgcatgtgtctattgatatagctctccctggaggtttccttaatatttgtaattggggaatatttcatttagcttattaaaaacattgaatttaaaagtctcaactcatttctcctcctcagtttttctgctgcttacttttctattcacccacctctcttgcccctagcaattttcctagaggccatatctgaagcttgttttgcaatctttggcaccctgagtctgcatccttcacatttcttcatccttaggaaagtgatgtaattttgctactgctgtgaattctttttaagacagattcaagatgatttgcctgtcttcagtggcagcgctgatgcttttatgctgggatgggtggcctcaagggtcttgtcagatatttaggaaatgggcagtgataaaaaccaccattttcttcttccctgggtctctgattggtatccagagtgatggggagtgctttctctgcctttccttaaccagtgagatagtacagggatctagaatttctggagagctggtagaagtcttaggtattcttacattgtccccaaaggaagaacctcagagtctcaggacaattttttttttttttgtggagacagggtctcactctgtcagccaggcacaatcactgttcactgcagtcctgacctccccggctcaggtgatccttccacctcagcctcctgaatagctgggactgtaggcatacaccaccatgctcagctaatttgttttcagtagagacagggttaagccatgtttcccaggctggtctcaaactcctaagcttacattaatccactgatcttggcctcccaaagtgctgggattacagtgtgtgtgagccactgcactcagctaaaatgtttgatgtttcctctcacatagaagatagtctttctactgaggattaggtacagagaaataaaaattaaggtcttaagtgtatattttcctgtacattattataggaacaaaatctgagaaaatagaactcaacagaaataataaataattattagaattttatagaaacagatttgtgaaggttaaggattcagattaatgtccactaatggccattgtgaaatctgatctttactgtccttgagatttgatacaagtttatttgggactcagttttccctttaataaagtgagtatcttcatgtatttctgagaagccttcaagctcctgcattctgtagaatggtatgtatcaatggattttattttcagaattctaaatttatcctcctttttcctttgtaacatttaaaattttataaggaatacaggctggactcaagtagaataatatgaaaatatgcttaagttcttatagcaaccaaagtaatggaataaactttcttcaattttcagccttgaaaaaacattcctcagttaacatatttcaggtttatgaggcattgtaaggcagccatatagactacaatcctagtgactcagtttttaacattctttagttcacagaatttcagtaatgctaaccttaactattcccatgttacttccagaagatatcttgatttgattctcttgtaatttttcctatattgccaaattagaagtacataattacttacatttattatgcagagtattcccttatatgaatctattagaaacctaaatataaaataggaagaaggatatatgtcttgttatctcaccttatgaaagttgttatgaaaacacttgtttatgatggagaatctgtgagtccagaactagaagttatgagggagagagtagttaagagcctggccactgattatgtaacatcctctcattctgtttcctcatttattaaatagggacagtatgccaggcacagtggcttgtgcctgtaattccagcactttgagaggccaaggcgggcaggttgttttgagcccaggagtttgagaccagcctgggcaatatgatgaaaccctgtctctaaaaaaacatacaaaaaattagccaggcatggtagtatgcacctgtagtctcagctatttgggagacagaggtgggaggattgcttgagcccaggaatttgaggctgcagtcagctgtgatcacactactgcactccagcctgagtgacagagtgagaccctgtctcaaataaataaataaatagggatagcagtatgcatctttataggattgttatgggaattacatgagtaataatacacttacattaagcctgacacctgctaagcatgcaataaatgttaactgctattattgtgcttattactgttatcaaatatgagaagcccatataagcaaactccaagatgggctgaaacatatatgtgacacaactgcttaatctaccctcatctacttccattaggtagaaggggatgggaagtgaggaaaaagtattaatatatctttgtattttttaagtgcctgaaatgttttatattttaattttttgatgctggctgaaattttaccaggcctgtttttaaaaatttttaattaatgatggatattcaacaaggaaaaaaaatcactaccccataccatacacaaaagtcttttcctgttcctaaatgtgaaagattaaagaggataacacaagatattctatttatgatctggagataggcagagattttgtgaatagtacagaacaccagtcataaagaaaaagattaataagttaaacttcattagatttaagaacttttatcaaaatataccactaagagtgtgaaaagacaagttacacaataggcagagatatttgcaataatttaaataatagaggatctgtatccagaatatatagtataataaacttgtgcaaatttataagcaaaaggcaggcaatgcaatagaaaaattggctaaatacctgaacagaaacctcacaaaagaggatatccaaatggtaaggaaaaataatagaaaagtttaatatcattagtacaagaaaacacacattaaaactgcaatgggatgctattttatactatccagattgatcaaaattatactctgacaatggcaagtgttgttcaagaggtgaaggaatggaaattgctagcatcacaactttggcaactatttgtcagtaccactgcagttgaagaaacacataccccgtgacctgttggttcctctcctgggtgtagtccctaacaaaaatgtttacacatgtgtgttaagagatatgtacaagaaagtttaggccgggcgtggtggctcacacctgtaatcccagcactttgggaagctgaggtgggtggatcacttgaggtcaggagtctaacatgatgaatccccatctctacaaaaaatacaaaaaatttagccaggcatagtggtgcacacctatagtcccagctgctcgggaggctgaggcacgagaattgcttgaacccaggaggtagaggttgcagtgagccaggaatgcgccactgcactttagcctgggcaacagagggagacgctgtctcaaaaaaaaaaaaaaaaaaaaaaaaaaaaagaatgtttatagctgcgttatttgcagttgcaaaaatattggaatctaaatactcaccaacagtagaacggataaatatgttgtgctattaagatgacnnnnnnnnnnnnnnnnnnnnnnnnnnnnnnnnnnnnnnnnnnnnnnnnnnnnnnnnnnnnnnnnnnnnnnnnnnnnnnnnnnnnnnnnnnnnnnnnnnnnnnnnnnnnnnnnnnnnnnnnnnnnnnnnnnnnnnnnnnnnnnnnnnnnnnnnnnnnnnnnnnnnnnnnnnnnnnnnnnnnnnnnnnnnnnnnnagcctcccaagcagctgggactacaggcgcccgccactgcgcccggctaattttttgtatttttagtagagacggggtttcaccgttttagccggcatggtctcgatctcctgacctcgtgatccgcctgcctcggcctcccaaagtgctgggattacaggcgtgagccaccgcgcccggcctctttttctttactgtatattacataattacttttttcaactgtatgggataaatgatctgtgatagacctgcttgggtatatatgtacttactttaaaaaagttttgtttctatgggaaattatattaaagctataggccactcactaaaaaaactatggaatataagctggattgtgttctgtcaaaacatcattagaattattaagaattattattttaacttttaagtttgggggtacatgtgaaggtttgttacataggtaaacgtgtcatggggtttttttgtacatattattccatcacccaggtattaagcccagtacccgatagttatcttttctgctcctctcctttctcctccagtcctccctcaagtagaccccagtgtccgttgtttccttctttgtgttcataataagctcttatcacttagctcccacttataagtgagaacatacggtatttggctttctgttcctgtgttagtttgctaaggatggtggcctccagctccatccatgtccctgcaaaagacaggatctcattcttttttatggctgcatattagaattacttttatctttattttgtgtatagcgttccttagacataggactttgttttctttgtgtaatttgcatttctgtggaccttctttgaattttggattcatgagcacatataggaagacattactgtccatttaggaattcctttttttggaacattttacctctttcacctgtgatattttaccacaaatggaagtctgttctcaaaaagaaagttaggtttatttattagtctattattagctattatttattagtcatttaactcatttaaatttaactcatttaaattattagatttgaagacttaactatagtctttaacacaacttaactccctttttgctgagagaaaaatatgtattgtttagcattcaggggaaaattatatatatattaatatatataatatataataagtattatatattatatattattatgtatataacataattatatacttatataattatataatatatattatatataatatattatatataatataaatacatatataataatatatataattatatattatgtattatatataattataattctatattatgtattatatattatgtaaatatataatgtatacattatatatattagtatatattatatacatatataatatgtattatatattatatattaatatataatacgtattatacatatataatacgtattatatatcatatattttatatttatatataatatgtattatatattatatatatattttatgtatatatatatttttccttcatctccttctcctatactgtcatggctttaggttttaatcttactttttaaggccaagaatattgaattcaaatcccagactattgaagtcatagatgtagtttgcagacagaaaaattttgttttgttttctctagccttattttgccattccagtcatacatttttgtttttatagaatctagccttttttcccccttccaatgcttgatataaaaactttagctatttctcccttttattctacccattaatagtgtgtcatttgaaagaggtagttctccctattgagttggcagtgtggtttgggcaggtttgacttgttaactgacataatcttgccttatctaatgcatcatcactgctcactgcagcctcaacctcccaggctcaagtgatccttccacttcagcctctcaagtagctgggaccacaggcatgtactaccatgcctggctaacttttgtatttgttgtagagatggagttttaccatgttgcccaggctggtcttgaactcttgggctcaagtgatcttgcctgcctcagcctcccaaagtgctgggattactgctatgagccacctcactagacctaattctcacttacaaaatgagatacgtataacaaaaaaatgaagagaacatctctttaaatgaggtctcaacttatttcctatcatacacatatgcttagggagtaggttaaaaatcatttaagattctcaactcttgttttgaaaaacacttaattaaccttgttaaatatcaaactttacgaccataatcataaccttaagggaaagagcgtcttttcctttggcccatttgctcacggcaggcaatcttcttagtgctgagtgttttccttcagcctaaatgctaaaaattcaggacacagtcattaatagggatgacagcggtagcatttcatttatgaatattcatgaagtgaaatccatagcattaattacattaatttacatacctgaatacaagtgagccataagtgataactaagccttaaaaaaatgttgctaaccatatattgtatgttttcttttaaatgttatttaataagggtgaaggtgacatttctgtcaaaaggcatttgggtatttatagttagaaatgtttttagcaaagaattaaagcacagtataatccttcagttttcataggattttgtagggcttataaacattctttaaaggaagaaagtatacagaaaaatatatgcagttgaatacaggagaaaccttttatatgaataagggtattagtggttacttgatgcttatttaggatcataggctttttattctgtgagttttaattcaacatattcttttgaaaggatacatgattgaaaataattcataatctatgagaatgaaatttattttcatccagttttgtgattgagaaactctaagtgggggaaataacattctacatacatttttttttttttttttttttttttgaggcagagtcttgctctgtcactcaggctggagtgcagtgatgtgatctcagctcacagcaacctccacctccaggtccaagtgatgctcccacttcagcctcccaagtagctgggattataggcacctgccactatacctgactaatttttgtatttttagtagagagagggtttcaccatgttggccaagctggtcttgaactcctgaactcaagtgatccgcccaccttggcctcccaaaatgctcagattacaggtatgagccactgtgctggcccagtgcatttttaaagaagttaaaaacgtatgccaatgtgtttagtaggtagcataatagctatattgattttaaaatgtgagctaaaatgcctgtctttgtttggactcctattacaaattaccataggtggtttagatagcaaacatttatttctcatagttctagaggctagaaagtacaagatcaaggtgctggccgattcagttactggtgagggccctattcctagtctgtagacagcaggctgcttgttatatccttgttataagagggagagatagagggaggtcgtctttcttgtgtcttttcttataatggcactaatcctatcatgagggctccattttcatgacctaattaccacccaaagttgctaccttcacatcacatacaatcacattgggcagtagggtctcaacacatgaattttggggagtcacaagcagtgaatctgtagcaatgccataacttgaattccttcaaagtatatgagattaaatatcatcattgccttgaaaggacagattgtgtatatgttttcaactgttgtctttgaaacaaagtatcagaattaactggttaatcaacattttagaaactcattgaagcatattcagttaattatactgaagcatattcaatatagtgggccctccatctgcttgagtttcatgtccttggattcagccaactgtggatggaaaatatttgggaaaaaacaaacaataaaaaataacactacaacaataaaaaaatacaaaatttaaaaatacagtataacaactatttacatcttatttaccttatattaggtattagaagtaatgtagagatgatttaaagaatacaagaggatgtgcataggttatgtgaaaatactacactattttagataagggacatgagcatccatggattttggtatttgaaagtagtatcaggaatatttttgtgccaggtgaggtggcttatgcctgtaatcccagcactttgggaggttgaggtgggagaatagcttgagctcaagagtttgagaccagcctgggcaacataaacagaccccatctctacaaaaaatttaaaaattagctgggcatggtggcatgcacctgtagtcctagctacttcggaggctgagtcgttgggatggcctgaacctgggaatttgaggctgcggtgagccatgtttgtgccactgcattccagcctaggcatcagagtgaaaccctgtctccaaaaaaaaaaaaaaaaaaaaggaatatttttgcattaattaataagtgaaatataaaattacttagaaatatttatctcattctataatttctatttttgtatatactttaaaatacatcttatgtgtaattttataatgtatattaagtttatgtatatataattaagacgttggcaaatatgtgaactttttatttagtttattctgtcatttcatactgtttacatagtatagaaggtcttttcatagtgaaaatattaaagaacaagactgacacactagtatagacaagttatcttagatcctttctttatgctgtgggatacctgtgaaataacatctggtggaatttttctcttttttattattatagatttttatgttagaactgtggcagtagtcattagagatggtagattatgatcaatattctctgatttaagaatcaagttaatttttatacactttagaaagctttttaaattttaagttagttaaagaaggaaaaaaattttataactgaaatgcttgtttacctgaaagattcacttctgtaaactgatagtgtattcccccaacagtagcagataaatgaggcattaataggcttgtaaaaattggggtaagtgggaagctactgtgtatttggcctaacatggtttttaaatgctgacaatagagttatctatttttaaatacattgctttcatttttggctgcatgaatatcctattttcttcttttagaaaagatattactgcattaacaatatcacttttaggttttgttttttcttgtcttaaaatagtcaaattgtagctttttcacttgctgtgtgcgctttcaagatttttttttacccgttttcttctctgcagcagtctcctgggttaggcaggcctatctggctccagattgccgagtctgcttacagattcactctgggctcagttgctggaggtgagtgacatgtctgtgtgctgtttgaggcttgtgttaatgtaatattatctcaccagactgaggcagatcagcaaaggtgcagttcattgttcccatgggtcacgacttcagggctttctgaagtgttctttatttttacctatgatcaggagacttgtcgtagcaatggctatgaccatctggctccagtctgtcttcaggacagaacctctgtaatgatgtgaaagtctgggatgcagtgctgcactcaccttaattatactggctaaggccagtatgaaaaaatggaaaatgagactgtgtttatgggacaggttaagaaattgagattcgctattatccttagcaaactaacgcaggaacagaaaaccaaataccacatgttctcatttataagtgggaactaaataggagcttattatgaacacaaagaaggaaacaacagacactggggtctacttgtgggggagggtggcaggaaggaggggagcagaaaaaatgactgttggatgctgggattaatacctgggcgatgaaatatgtacaacaaacgcccgtgacacgtgtttacctatgtgacaaaccttcatatataccccacacctaaaataaaactaaaaaaaaaaagaaagaaattgagatttgggatatgaatcccagaacctcgtgaaataaaagagcctctcaaagtgacccagttttgcttttctgcttgtatgttttcctttcccttatcgcttgcttaacaatatctggacttgatgtttatttgcaaaaatgaacctcccttccctccctgttcacagccaaaatttgagagactgtttttgcttaaatactctacttagaaaatgtgtacaatctgaagttgctttgttgagaagaagctagcaggtgtgattaaaatgcttacgattttttaagataagcctgaactcaaaagacttttttttttcttttcactctcagttttagaagttgcaaaccaggttttggctttcagcagtcaaaatgtgtaatactctcgttcatgtaaataaattttcattccctgagaaattctaaagcatagccatattttcttttaaaccaaattctatacatagggataggataatgttgaagtgtgtttctaatattatggttgtaactatgattaatttaccaagatgctttattaaactaaattttaaaatcgtagccacctagtgtacggatatagtcattttaagaagtaactggcataatatttaagcatttaatggaaaatataaataaatgttatacataatagtttaatgttgttactatagaaaactgagtgttgattatctaatttgggaagtgactcgataatccactctgtagtttatgaacctacgatatcaaagagcattcttgacagttgttttctgaagcagctgtatttatggatttcagtgcttgctatagcctgctatccctaaggtgtttgtgagggaaagaaaaataataaactctcttttgtgagaatacatgttgtgttttattttctcatcctttaagataagatttgtcatccttatggactctccatttaattgtgttcttttttaagcctaaaaattgttctgtttgtagctgtgggagccactgcagtgtatcctatagatctggtgaagacccgaatgcaaaaccagcgtggctctggctctgttgttggggagctaatgtacaaaaacagctttgactgttttaagaaagtcttgcgttatgagggcttctttggactctacaggggtgagtaagcaaatcccagctgctgaagttagtgatttgatctcaccagcagcagattttaactcactaattatggaagccaatatgtagtatgcctagccagactaggtctgtttctctctttttattttctctttgctcatttccctttttgcattctttctggtgattagcaatattaatctgcaaataaggtcttcatttcttcttcttgtggtttatatttcttggtgtccaaattatgtgtttgtcccaacatgggtctatgtcaccatgctcctacaaaccaaggcacatatctgcaggtggaatacaaggatgatagttaagaaatatagagctgcttttctcaaagaattaaagaggagaaatacatctctttcctgtgaaaaagaatccaggttaccactcaaagatgagtttaccctccatatatttatttcaactgaaataaatatcaaatgtttttgtctctttcagggaccatttataaattttttccaatgagccatctgaaggtttaaaaaaaaaaaaaaaaaaggaaaaccctttggttccaagtctaattcttgcttctttcccccacttagctcagaggtgtacagtcaaaacagagagattttctttcgcagggaatgttagcagccactctagactgagcacagtgcagttggcatcagaggcagcactgcgccccatgcagaattttccccacccccccgttgtctttgtaggaacttgtctctttggagagagaatgactttcatgtatgtgttttcacattagaatatagggtttcctttgggagggagattaattttttaatctctttgggcgccacttgggattctatgaaaatactctctacatgctcaagtccatgccatttatgtaatttactgtacttgtttgtttgcacatacaagctcattaatccctagcctattctgagctctgttgaactatttggcttagaaatcttcctaagaaagactgggcccgaacaaagctttatgctcatggacaggaggaaaaaaacaccgctggttagcattatatacaggtattcaagcaaaaaatataactccgataaactcataattgaagtagagggtcacaaggatgttcatttttagcattatatatagaataataggagagagttatcccgaaatcaaactaggctcaagtaccctgctcttgagaatgaatgtgatgagttttcctcaaatattcagaattgtagtctctttgaattccacctgtacagcatgtaccctgtggaaaggcgtacaatatccagaatgcagacctttccatgtgaatgcttgttttaactgattaaaccctgcatatccagattttatttaatggggaatcaaggttgagtggcattaaggttgtttttttccttgatatctccaatatttctttgttgaataatgacctttctcctctttggtatacttttaaattgcaaagaaaatgtcccctattaaaaggaacctagatatttactgcatagtttagccttctcaatggatagatgcttacagaagatttcatttgagagagatgtcatgtttattaaatggatgcaatatagcaagtaggggaggggattgttggttttattcaggatgtaagctcataaaagcagttctttaaatgagagacttttgtattagggagaagattgtaggagtcctgtatgtgagcactatgattattgagattgtcatatattgcttgcaactggtccattattctgtcagatgattgacaaaattgttgacagattagctaaatttcttcgcaggcaacaatgataaaatgacacaaatcagtactttattaaattccatgagccttattgaggcgagttgtaaaacaaatatgcatgctgacatggttgtatgggagttagattaaaagtaatagagcctgataatcacgagggttagaaagttaatactgccatctgctgatttgttcttttaaatcagtctgctacgcatgaaaggtgtgtgaggctttgtgtgtatcattgataattcagcctgactgacagtagcctatatgtatgattacttgtggctctcaacttatggaactcagcagtatcctcaaagcaggcttaagatcagcagtcagcaagcaggcaaacacatatataactcccctttggctggatgatttaaaggatataaaatgtttattgttagcatctttaaaaaatgtatgcaaaaaagtatgctaacaatttggataagctgtgtgctttagaaagctgagcccaacagatgttgaattgtttatttttttcttttccagtttacaaccagcctggggaatttaactttctaaggattatgatttcctttgttttgaggggattcttttaaaatgtcttaagcttgacatatattagtcaataagaatacaacaggcatatgtttttgcttataggagatactcgttaaacaatacttaaaactgcatttttctttgcagttttggcttccttttaaataaatgaatattgaatgctgtgtttctctgaagagaagattatgggagttagtattctataataacgaagccactgtatgccattatgtaggtagcatagtttgtggcaaaatctgggtatgcttaacagcatgcttttcagagcttttccaagtgtacagtatctgtgtatgtttatatgttgttggttgtaataagggagggaatttggttacattgttattggcagtgttcccagaatagagaagacgcatggctccgtttcttcttcatggactttttgggaagtgttggataactaggctttaaagtaagcatgcttaagaagaggatttatagcctcaagaaaacgtgacattatactgcatttgtaaataattattacatatgtatacagagttttaaggataatctttttcccattttaatgaaaactctgcaatgtttgatgggtaaataatatgggggaaactctttgttgctgggcttgtgtattcatgtctggtacagctatattgctgatgattctgtccctttacctaggtctgataccacaacttataggggttgctccagaaaaggccattaaactgactgtaagtttatctctaactgaatttatgtcatttgtttagattaccattaagccaaaaagctaaaatcaaggctaggcgtggtagctcatgcctataatctcagcattttgggtggtgggaggatcacttgagaccagttctaaaccagcataagcatagtaagaactcagctctaccaaaacaacaacaacaacaacaaaattaaaaattagccaagtgtggtgatttatgccaggaggctgatgtgggaggattgcttgagtccaggaatttgaggctgtagtgagctatgatcatgccactgcactccagcctgagcaacagagtgagaccctgtctcaaaaacaaaactaaaattgatgctgctgacactggcacactgtcgcagaatttgtacaactttaattttacatgtaagcatttgataattttaaattttatcataagacaaatattttgctgacttggaaaagcaacagtatgccagaagagaaatggttgggaattttggttaactgatgttgtctttctaattaggttaatgattttgttcgggacaaatttaccagaagagatggctctgttccacttccagcagaagttcttgctggaggctgtgtaagtattactgttaggcgcttcttgtgacaaatacattccgttgacctttttgcacagatataatagatatcttagtggcatttctcttgaactcaagggattctaagcaggttttctcaataatcatatggaataagttttaaattttattgtaaaagctaacgggttttgagtgtagaaaagaggtagcattttccgccagttagaatggtgatcattaaaaagtcaggaaacaacagatgctggagaggatgtggagaaataggaaccattttacactgttggtgggagtgtgaattagttcaaccattgtggaagacagtgtggcaattcctcaaggatctagaactagaaataccatttgacccagcaatcccattactgagtatatacccaaaggattataaatcattctactataaagacacatgcacacatatgtttattgtggcactattcacaatagcaaagacttggaaccaacccaaatgcccatcagtgacagactggattaagaaaatttggcacatatacaccatggaataatatgcagccataaaaaaggatgagttcctgtcctttgcagggacatggatgaagctgcaaaccatcattctcagcaaactgtcacaaggacagaaaaccaaacaccacatgttctcactcataggtgggaattgaacaatgagaacacctggacacagggcagggagcatcacacactggggcctgtcatggggttgggggttgggggttgggggagagatagcagtaggagaaatacctaatgtaaatgatgagttgatgggtgcagcaaaccaacatggcacatgtatacctatgtatcaaacctgcacattgtgcacatgtaccctaaaacttaaagtataataacaaaaaaagaggtggcattttcatcagctctatctctttgatgctcctaaagcattaccttccagacttttttaaaagttctaattcctatgccttttaagaaatagagtacagaaaatatagtagtggatagagttaccattcatatatgttaactggaactttaaaacaagtgtgagatggctgattaattgggcccttatatcttaggtataggactgagtaagccattgtttaataataatttttcttctttagaggccagagggtatggcaaacaataataacggtaactacatttcagctattgacagaaattctgaaccaagagactcagatatttacttagcgcacaaaggtttctgtctttaaagtgtaagcatgacatgattattggcaaacaataataacggtaactacatttcagctattgacagaaattctgaaccaagagactcagatatttacttagcgcacaaaggtttctgtctttaaagtgtaagcatgaccaattcttaaatctatttgcagctcaactaatttcatttgtggtatttgtttcatatttgataacacatggttcgtttcagacttgtttagtccattttgttcttggaaacattaataacttccagttgaattggctgacagtcttggctaaaacttcctcagttgcttgtgaaacctgaagtgatgaggtcagtgaccttggcaacatttaattcagagacactgcctcgggggtcagagagagagagaggttgctccaggttctctttgatatgtgtcagtgtggcacatacctgagtcctctgcagagttgctttggaagaggtggactgctgtgtgggtgtgtgtgtgcctgtatgcatgccccagcacattctcaggaaggaaatctctttggctacatttcttttttaatgaagagttaacagtggacatagaataaaacttttgcttaggtggatcaccaaaaatgaagtttctcttcttcctttattccaattagattctgtaattggttcttatctagagagcgaacctttgccaatcataaatattctttttcttggtcattttaagtttctgtttggttaagaagctttctaactcatttttatcacagcacatgcatacctttgccagaaatataagtcatgctctttctgttccatgtagctaattatttgtttccatttgcaatatccaggtttttggtcatgaagctgacctgtttccatgtctgacatgtgacctaagtggttaaaccaaaataagatgtttagttcctttgttcttcctagctaccgaccctgtttataggtttgaactttaggaatttctattgaagtctgggttgccttgagggttgtgctgacactctaaatctcttccttaatcatgactcatttctggaggctttgatggattgtctagtgggaaattgacagcatgaaaaatagtcaggttggactctaggcagaatgataaggttgtctgcagttcttcaccacaaacgttttctgcttcccccttgctctaaatctcttctttcagggaagaagaaaaaagtgcaattattgagtttctactgacaaattcagttatgctatgctataaatgattgttaaaacataattcactgtttctccccaaagtctataaatttcaacagagaataaagtcttaaaaagaatgagtctctctttatagaatatcaggctgtatgggacataggatactccatttcctaaatgatacctggcaaacagccaccagattaacactgtgaagagtggctgtctgtgagcctgaccctgagtcttcatcatcctgagtagtggtggtgatacgatgtacggtgtccttatggcttttggctgagtgctgtcagtgccactagtgagaagaatgctgctgttcttccaaaaattacccaattttaaagatgcacctaatgcattaacctattgcaggttaattaggaagaaatggctcaaattgagttctaggctttttttcccagaggaaggattagctaggacctaggccttgagttccctatagatgagagggaaattttattgccatggaaatgacaatattcccttttaggaaaaatggtgtgtgttgactagatcatgaagtgacctagaagtgaaaatctctagtccttgggcattatatattttgttgttgttgtatgttttgttttattatctggtttgtttttgttttcgtttttgttttgagatggagttttgctcttgttatccaggctggaatgcaatggcacgatctcggcccaccgcagcctccacctcccaggttaatgcgattctcctgcctcagcctccctagtagctgagattacaggcatgtgccactgcacccggctaattttgtatttttagtagagctggggtttctccatgttaggctggtctcgaactcccgacctcaggtgatccaccggcctcggcctcccaaagtgctgggattacgggcgtgagccaccacacccggtctttatgatctgtttttaaaggcatgtgatttttgtttttttgtttgtttgtttttcttcttttttgagacaggatctcagtctgttgcccaggctggagtggcgtggtgcgatctcagctcactgcagccttgacaactcctgggctcaagggctcctcccatctctcagcctccccagtagctgggactacaggtgcatgccaccatcctctgctaatttttgtattttttgtagagatggggtttcatcatgttgcccaggctggtctcgaattcctgggctcaagcaacccacctgccttggcctcctagttttgggattacaggtgtgagtcaccaggctggccaaggcctgtgatttttgatacatgcaaaagaatacaaacaatataattacagaataataaaatgagcatccatgcttctagcacccaacttaactaaaacgttactactattgttgatgatgattattgcttttgatgtagcttgaatcagctaatgaggaatagatacctttcttactgggctgaacattttatagggattatctcattattgttcccaactagagttgaaaaaactaaaaccttagtgaaatccaaattttgacttagtaaatatcaaaattgtggttcaaaccacttctatctccaaatccatattctttcacacttgatataggttttcatttgttctttcatatattcacttactcattgaatacctgatatctttcatgcaaattttaaaaataccacctttaggccgggggcggtggctcacgcctgtaatcccagtactttgggaggccgaagcaagtggatcacctgaggtcaggagttcgagaccagcctggccaacatagtgaaaccccgtctctactgaaaatacaaaaaaattagccaggtgaagtggcgcgttcctacagtcccagctacttgggaggctgaggtaggagaatcgcttgaacccaggaggtggaggttgcagtgagctgtgatcgtgccactgcactccagcttgggcaacagagtgagactctgtctcaaaaaaaaaaacaaaaaacaaaacaaaacaaaaaaacagaaaaaataacagctttattgagatatacttaacgtaccatacaactcccccatttaatgtgtataattcagtgttttgttgtgaaaccatcaccacaatcaattttagaacatttttatcaacacagaaagaaatgcagtaccttttagctatcacttctcaatcttcccatcccatccgtaagatctaggcaactgtattgcccaggcaggagtgcagtggtgcgatcaaggctcacagcaaccttgaactgccggctcaggcaatcctcccacctcagcttcatgagtagctaggactgcaggtgtgtgccaccaccctcagctaatttttaagtttttcatagagacagggtcttacttggccaggctggccttgagctcctggcctcaagcaatccttctgcctcctcctcccaaagtactagagttacagatacgagccactgcacttggcctctaggcaactattaatatactttctgtttttacaaattcaccaattctgaatattttatataaatggaggctgggcgtggtggctcatgcttataattccagcactttgggaggctgaggtgtgtggatcacttgaggtcaggagtttgagaccagcctggccaacatggtgtgaaaccccatctttataaaaaatgcaaaaattagccaggcgtggtggcaggtgcttttaatcctggctacttgggaggctgaggcaggagaatcacttgagcctgggaggcggaggttgcaatgagcagagattgtgcccactgcactccagcctgggcaacagagagagactctgtctcaaaataaataaataaataaataaggaatcatgatatgtggccttttgtaagcatgacattgtgcctaacttttttcacttagcgtgttttcaaggttcatctgtgttgtagcatgtatcagtacttaattcatttttattgctgaatatatggatatactacagtttgttcattcattagttgataaacatttgagttgtttctaccttttgacttatgaataatgctgctatgaatattggtatataaggttttgcatggacatgttttcatttctcttgggtatatacgtatgagtggaattggtgtgtcatatgacaactgtaattagcattttcaggactgccagactgtttttcaaagtggctacatccttttgcatccctactagtagtgtgaagcttctgatttctctacatctttgctagtatgtgtgtgcgcgcgtgtgtgtgtgtgtgtgtgtgtatttttttaaataatggtagcgtctcactatgttgcccaagctgagagtgcagtgactgttcacaggtgtgaacatcacatgctacagcctcgaactcctggcctcaagtgatcttcctgccccatcctcctgagtagctgggactacaggcatgtgccatcatgcacagctactttccacatctttgataacacttcttattgtctttttactatagccatcttactgagtgaaaagtgataccttattgtggcctaatgactgacaatgttgagcatctttttgtgtgcatattgaccacttgtatatcttctttgaaaaaatgtctattcagaatttttgcctatttttaaattggattgttttttggttacagagttctttgtatattctagatatgagtcccttttcagatattttttattttcttgatgatgtcttttgaagaattgggctttaatgaagttcgtttaatctattttttcttttgttgtttgtgcttttggtgttatatctaagaagtcattaatccaagatcatgaaagatgtatgccttttttttctggtatatagaaattgactttatatgtatgcctccttttttcttttcagagttttatagttttagcttttacatctaggtcttttccgatttttaagcctaagttttttaggttttttttttttgccttgaacagagagagatattactaaatgtcagttttgttttagttttgattgctaatgttttggtgtatttccttctaatgttttcatatacatgtgtacatgctcttatgcatagacatatgtgtgcacatgtgtacacacacacacacacacactttttaaaaccagatggaagttttgttgactctgacttcctgattggaaatgcaagcaactctcacttactacaggaaagagggagtcacagtggaatgtcttattttagaagtagtatataacctttgggaatagtagtataaacagattgtgcattttcagatttttatttttatttttattttttcgagatagagtctcgcactgtcgcccaggctggagtgcagtagcgtgatcttggctcactgcaagctccgcttcccgggttcacgccattctcctgcctcagcctcccgagtagttgggactacaggcacccgccaccaggcctggctaattttttgtatttttagtagagacggggtttcaccgtgttagccaggatggtctcgatcttctgacctcgtgatccacccgcttcagcctcccaaagtgctgggattacaggtgtgagccacagtgcctggcccattttcagatttttaaatctcattgtgaacattaaccaaacttgtgttttgtatctatatcaaaatcttctcaaacaaacttactcattcagaatttatgataacttggatgtgctatcccaacatgttttttgtttatttgtttgtagtatctataaattgaactctaggttaaattgcctgaccttggctaggtgtggtggctcatgactgtaacctccacactttggaaggctgaggtgggaagatggcttgagcctaggagttcaaggccagcttgtgcaacatagtgggaccccccatctctacaaataataataattttttaaaattgcttgacccttttttaggtggagatggggtaagattgtatgtgtgtgtatacagttgctcagtaaatatctcttatgaatgttgagtgttgtatgagtattaaatatgtaacagtaggttttaaataatttttcctgttattctcataggtaaaccattcttatcagaccatatgtttatttttctattagaaaatttctgtctttctgtacacacacacacacacacacacacacacacacacagatccagatattcctcgacttacaatgaggttacattgtaataaacctatcatgagttggaaatttttaggtcaacagtgcacttaatacacctaaccttctgaatgtcatagcttagcctatcctacctaaaacatgctcagaacacttatgttagcctataattgggcaaaatcataaaacacaaagcctgttttataatacagtattggatatctcatgtaatttattgaatactgtactgaaagtgaaaaacaggctgtatgagtacttgaagtattgtttctactgaatgcatattgcttttgcaccattgtaaagtcaaaaaaccataagttgtatcattgttaagttggggaccacctgtatatatgtgtttatatataatatttatatgtacaaatgtatgtttattcgaagacacaaatataattgaatgtttgattatgatatctattgtgggcaaaaatagtaccttaatgtcaacctagaattttcaaagtacattattatgcattattgtcaccctctataaaataggtagatgagaaacagaagtccaaaaaggctaactctcttaccccaatttacacagctaatatatgctggaggtttcatgtgaacccaagtattctgatttttttagaccaagtccttttattctatgatgtccttttgggggaatcaaatcattgattgtgtcaaaataaatctagatgaccctattcaactttatagtgactttcttgcctctttccttccttcctttaataagtgtatgaatatgacatatttacatatttggttttttaggtataattaacatttttaaaaggaacagattttagatattcagctcaatgagttttgacagttgtatacacccatgtaatcaccacctaagataatgaacatttcaccccagaaaagtcgttcatgcgtctttccattcagtcccttctcccttaccccatgcaaccacacttctgatttctgtctgaagttttgttgttcttggatttcatgtaaatggagtgcacgagatgcattctttcatggctggcttcttttgtttaacatgttttcagagagtcatccttgtgtgggtatcaggtttgtgtttgttttaaattttgctgagtagtatttcatcgtacgaatttaccacaatttgtttatccatttttctcttgatggatgtttgggtttttgtctgttacaaataaggttgctgtaaacattcttgtacaaatctttttgtcaaccaatattttcatttttcttgggtatctaagaatagaatagagtcgatgtatattcaatttaaaataaactgccagttagttcttagaagtggatggatcattttatagtctcctaagcagtgtacaagtattccagttgttccacatcttcactaatgtttgatatctgtagtgtttttgatagtaatcattgtaggtatgtgaaatagtatcttattgtggtttaaatttgcattcttctgattcctaaagatgttgattatcttttcatgtgtttattggctattcgtatatgtgtgtgtgtgtgtgtgtgtgtgtgtgaagtatctgttcaagtcttttgcgtacattttattaggtttcatattttttactaattgtaaaagttgtttatacatcatggatacagccctttgtcaaacagatgtgttgtggatatttttttgccagtttgtgacttgtttattacttttattaatgatgtttatagtagtttttaaagaaaaagtaattatgtagttttttggatagatccagaaacttaagggagaataaatttaaatatcttttcaaattaacaaagcagaatattaaaaaatctaaatggactaacctttaggtactttctaatggtctctttggtaagtacctgttcttttttaattgttaaactcgaatcagagattagtgataaacttacctagctgactgcattacctctttcagagagtatatactcctgagtggatggaagtcatgaaactcaaaacttattactcagcaaagtgctaatgttgcaggtgaattttcacaaccctatgcgaacacactttctggagaacacgttctttccctttgtgtcttgctttcagtctgcatagtgctctcaaatgagttagtagtgcacaagacctcggtgaggcagagagcatggttgtgggaatggaatggttatgccgaatgcaaaatctatgacgatctaggtcagtagtcttccaaacctagaatctttcaactctcccatgctttttctcagcttaagcatgtgtctacacacaccacatacacacaccctcccttcatatcggtaaagcaaaaagcccacatgttaggcggagcatttactaatcctgggggccaagatctgtaactagccagctccttatgatgaagaattctatgtcttcctcagcaagccaagcttgtatatctctaaagagtagtttggaaacagctcttccacctctcatccccaggaattagtgtagtccaactttatgcctacatacttatgtgaacacatatagatatgcatacaagttgaaaatccttatatatttatgtcaaaagtggcttatgataggtacacagggattttcattcttgctgtcttagttcattttggctgctattaaaaaataccttcgatggagtaatttataaacaacagaaatttattgctcacaattctggaggctggaagttcaagatcaaggtaccagcagattcagtgtctggtgagggagggcttgctctctgcttccaagatggcaccttgctgctgtgtgcttgcatgtaccttgctgctgtgtgcttgcatgtaccttgctgctgtgtgcttgcatggtaggagagacaaggcagctcccttcaacctcatttataagggcactaatcccattcactagggcagaaccatcatgacttaatcacctcccaaaaggccctacttcttaatactataatgttggatattagttccaacatatgcattgtggggaaacaccaatattcggatcatagcacttcccttaccctagttaggagtatatgtagtgttaatttgtaacaccctcgcatatatcatcactcagcaatgagcacattgcatttatttcttttaaactatcactatcctattttagaaagaaccatagcatttcctattgctttacaaaaatatgaacggttggtggtgtgcaaggctgagtcactgtctgttcctgttcctcttgagtcagtcctagtgacagctagttctgtgacttttactgtttatctggttattttatacgcacatactgtgttcatctggagttgatgtgaccttaaataaattgaagttagattttcatcagtctcgataagggaagactttataatgagttgcttagattggatattttgtggttggagggaaatcatttcaatctataggagacaacagatcaaagaaggaaataaacaaaggacttggcacaagcagggcccagcctccaacctctttgtgaaccttgccccaggggtaggattgagagggcagaaggttgaataggcctaatcctgtatacagcccctcggcctttggcactgtggaggcatggtgacatctcaaaattacatccttttccccgctaacttttgctgtcagctttagttgattttctcattaaaaaattcatatgatataagattaaatggaagttttttattctttccatttctgttatatatgggtaaccctcattcaaaatgagatttgttcccttttatgtatcttttaaactcagttctagaacaaagaaatgacaacagaatactgaaaaatagaaagcatctaagtctgttttagtattaatgtttgtatctcttttaaaaaataggcgggaaatttaagcaattagagaattagaagctaattttggtgatttcatgagtgaaaaaaattcagcaaaggtatgatatagagtggtatgttatctaatgtaagcattagtaacagaagcagcaagatgccaaatttagcaatgtccatttacatttatatagctgtgtatcattgtgatttaatttaaaattttatatatcttagtgtcgattatttcaggtcactagctatatttgattaggttttttgatgttcatatataataagctttttaaaaaaccttgggtccacagtaactaacgccaaccagtttaaaaaatatatttgccaaattaccaaatttaccatgaagaagaatatgcgagagaagacttagtctataaagaagccattgtttctaagaccaggtctgtttcttgttgttgttgcgtagttaatacattcatatgttttgaaatttaaaaggtacaatagagtatgctatgaaaattatttctcccagctattcagtttctctttccaggaggcaatcaatgttttaatctttaagccacttgggttttgagaaacttaggtaaattttgacatatttatgatcaaatgtgtgcctaatattttatgttctgtttttgtcatttggcgtgattttattatcaaatcatattgcccaattaatagcatagaattgtatctacttagctgttttattgggaatttgaatttcttcctgttcaattttgctgctattaaaaatagcaaacattagcatatttgtagaaatacaggtactattttttattgaaaagttactgtatttatgaaattctctatattaaagattatatttactgcaagcagtgcttttcccctttggaaagctgttattaatgatatcatttataatcaatagagtcttagaagaaatatggtatttctctgtatttgtttcgcagagaggaaacacccagttcaagagtttgataacatcatagtccctcattctgagttgcttgatttattaccagtataattgaactaatctcagattttactcccccttccctatccccagtttaatatgtaggatagagagagtggtcaacctcagaatccgaaaaagaacagtgcatatttgccatgtgtgtttccctttaagcattataaacatccagagttttagacaaattattacgttggtacaaaagtaactgcggtttttgcagtctttatctttgctaaaattattcagcgtttctggaaagtatttgccttatgttcctaggcctatcatgaggttttaaaaatgtatactaattactaaaaaaaaaaaaattttaagagataggggtcttgctccattgcccaggctggccttgaactcctgggctcaagtaatcctcctgcctcagtcttgtgagcagctgggactacaggcatgtgtcattgcacttggcttgtatgttaatttttaaaacatatacaaatcattaattgtcagaagttttcctccttcaaacataggcatgaaacaaacttacagatgtgtgccttgctatagtgtcattgattatttgcactcttacttgctagattatatgtgtttataaatgcacatcaattgagttttgtggttatgtcctgtgcgttgttgggatttggtatgtgtgctaggtaactaatcttcaaagcatacaacaattaaggtgtatgtatttttaaaatgtagtcccagctgggtgcagtggctcacgcctgtaatcttagcattttggaaggccaaggcgagtggatcgcttgagcctagcagttcgagatcagcctgggcaacatggtaagacccccatctctacaaaaaatacaaaaattagctgggcgtggtggtgcacgcttgtagtcccagctactcgggaagctgaggtgggaggatcacctgaacctggggaggttgaggttgcagtgagctgttcctgccactgcactccagcctgggtgacagagtgaggccctgtctcaaacaaacaaacacaaacaaaatgtagtcagttatttctttttattgtaccatttttgtaaagtttcagtagaaagcctattacttgtatacttcaaaaaatttgaagcattgttaaaggagtataaatctcaatcaattatttctaaaagagagaaggaagaggaggaggcagctgtggggtgggggtgggggacacggattggagtactcctgcccagcaggatgttataatttactaatgattacaaacatgaaagaccttagtatttatttaaacataatgtccacatttaacacttggcacccagggactgacactgtctggtagtggcaaatttgggggaattagaataaaaatttgtggttctattcatttttaaatctgctttagttaaaacataaagcagatatgcaaccattatttaagatagtctttgcaaccattatttaaacaagagatttcagggaagtagtaaactttttcaattgatttggtctttaatactagctacaggagcaattacttggattatcattttaacataatttttcatgcagcaatccttttgaaagtattgtttgcttagattgaaacattaaagtgcttccttctgcctgcagtacaacagattcaaagagagagaaaggcaggcaaatcaacatgtaaaattgggtcagtacatcgttgggggacctgtgtgccagtggtctggattgtgtcgagttgaggagttagaggaaaccatgagagagagatagcaaattgctgcacctccctgctcgaaggacaaagaggggattaaggccctggggaatccaggacaataagctgtccatgaagagggaaggaatttagtatcagtgctggcaattttgaatattgaaaggagttaaggagtcaggattggaataggggtagttgggggatttatagtcccaaggcaattaggaaaatgggctgagccatgttcctgccccttggaagcgggtctgggagggctttgggttttagataagtgagcaggaatgtgggcaaaggttgagcactgaagtgccattgaaagctgcatgtgaatttttaggtgttctatacctgtggaattacagtgccccagatttcatatttcacatgtgattatatacaatgattataatgatatgaatatcattatgaatattatatgagtatggttatgattacataatataaacagctacagttgaagatgtacaaatgggatttttcatttcatgaaaggagatatatattttatttatttttatatatccatagtcacacacatttttttctttcttacagaaaccaaaaaaaagaagttggtagaagttttgttaaacgttttttttttttctctactagttaacagatttcagatgcaaatatactctcattatccaaattcaaatctctgtcactcaccacaggaatatagaatgtggctttgatcttgagggtgttgtactcatggtaactagatgttccatttctcagctttgccttgaagagtttttctggttttgtcttgaaatgatactgaaatttatctttctaaattcttcccttttgtgtgggtgtagccatgtacctgtatcagagttttgcttaggataatacattttagaattggaactggaggagacttttccccttctgacttaaggcaccaaagtagttttaattgctctacaatccaaggaagcagaagcaagtgggtctgctgccaagaacgcttaccacaaagaggaaaaaaataattgtagctctgaattttagctctggcttgtaaaatatgacagtcttttactatctctttttctttcattgagtaccttgctgccacatctggctccgcttttttttccaaatgggtttattttgttattttgaatatggctggggtgatcctggaaagactggtctgagaaacaatcttgacatttcagctagaaacaaacccagaggtagattgatctgagacagagtttgggaccatccctctgaacctctccagggttggcctaagtgtcaaactgtcattcccccctgaggaaggaagtttcacctccttcttttcaagatagcaagatgtggaggctttgctggattttccttttttacgctgccagtcgggctctgatgtggaatctgcctgtctcttctcccttgcctacaggctggaggctctcaggtcatttttaccaacccattggagatagtgaagattcgtctgcaagtagctggagagatcaccacgggacccagagtcagcgccctgaatgtgctccgggacttgggaatttttggtctgtataaggtgggtaggtttaggttataatgtactcaataaaatatgaaagaatgtggaaaccagacttcttccctccaagttgaaaagcaatcttgtccagcagggtagtctgtggagcagaaaatcaaacaaaaagaaaagaatcaggacacttgtatgagaggcagtgggatacacatgcagcctctcctgttgtcatcaggcttttatgaaactgccagcaaggaggccagcaccgcagacctgctggcctcaggctcacagcctttcatttgctggggggcttgggaaaactttccctggtgctctctttgggttggtttagggcttcaaaatagtcttatgtttattttcggtctgattatctctattgttatcttcccagtgggagcttttgtcttaataatttgaccacagtaaaacagtagtagagtttggtaggattcaggtctttaagaagttaagtggtaggatttgtcaataatgaattccattaaaaaaaaaaaaaacaaaccaacaacagagtgtactgtactttaacaaaatgccagtcaaaagattccttccctgcgggtatacttactcccatcattacagatcagatgtaatggagcagaagctattatttttcttaaacaaggaagaatatttctttccattcctttgcctggtataaggggaatacgtaaatttagccaccatagccaagtgtgtttccacagcatctgatatagatccatcactgcagaaatgtgtaaatttgtttcggtaactgcaaattagaaattagaaattctctagattggaatcacacagctacagggttctctggagaccagcaaacaatgatgcctgtctcaagagagtttcgtacacatttttgcttcctcctccccactcccaatttccatcctttttgaattccctttgagagatgaatttattaatattgcttctctctgtattatcctttagcgagtccttggattttttttttttcaatgtttgagtttgtctttttttaaaaaagccagggctgggagcactggctcacacttgtactctcagcactttgggaggccaaggcagggggattgcttgagcccaggagttcaagaccagccagggcaaaatagcaagaccttgtgtctaccttaaaaaaaaaaaagaaagaaaaaattagccggcacagtggtgcacacctatcatcccagctactcaggaggctgaggtgggaggatcacttgagctcagacggtcaaggctacagcaagctgtgatcctgccactatgctccagcctgggcaacatagtgagaccctgtctcagaaaaaaaaaaaaattaaaaagaataaaacagagtcattaaaaaaacaagcgccaaggtggagtgtttgcctagctaggtagtggaatggtgtgggcttctgacaaagctgagggaggtgttctttgagacctcagtcattgggacaagctgcccctgggtaatgattttctactcctgtggaaacctgccgctaaaatattttgtctgctatttaggacatggggaatgaggagagaagatttgggtttcttttccccctgctctagagtagttacttttccttcaccactgcctatagctttttacctggcactgcggggactctcagctgatgtaaaaacttaagagggtagatcttgtgtgtttttaccatagtaagagattaattaattttaaaaactctgaatctatataagaaatgccagaaagttcttagttttcagaatactatcattacccagttattaactctaggactgcaggattcaccatgctttcacaagctttgagatatgcagatttccctattccccacttatctcccgcctcccccatttcccttgcacatcagttctaatgctgtttaagggacacctcaggcttgtcactgagggacacctcaagcttgtcactgacaaatgtcacatggatcccatttgggcattcacactcagtttcacactgttttgcactatttcctcactgtgtgacagggtgccaaagcgtgtttcctccgagacattcccttctctgcaatctattttcctgtttatgctcattgcaaactacttctggctgatgaaaatggacacgtgggaggtttaaatcttcttgcagctggagccatggcaggtaactacaaatttttttttaactgaaagaattctcccattatttaaaaagtacagaatctctatgtactttccccctttatttctggaagtattattgtttgtacctgacttagtttaaatatcactttttctcctttgtgggatgtgctgtaattctgatgagagttaattacatttgcataatgtggataaacagcttaatgcagcttagcaactcagagccaaattagatctgcccatctaaattgggctttcatcattaacatgtttcttagtttcctgtgcccctgaaaccttgagtacagccaagctaagcattaaggtgggaaagtttttcctcaaatcagttgcttagctgtatctcatgctcatgcacagatctagcatgctcttactttctctcttctgtatattggaatctacatgatttggccgaaaattgagcttttgtcgtgaagctgtccctcttcttcctaccattgccctcattagaccaaagtaagcagtacccctcagcaaaccaccttgaactcaatttttgtattttttctaatcgttaacactttgtcattagccaggtgtagtggtgcgtgcctgtagtcccagccagctacccgggaggctgaggtgggaggatcacctgagcctgggaggtcaaggctgcggtgagccgagatgacaccactgtactccagcctgggtgacagagtgagagcttgtctcaaaaaaaaaaaaatttgtcttttattaatagttatttgcataattgttatcctctgtactaggctaatagcttcttgagggcaagagtttcattctcttcatccttgcctttcctacgtggccagtgtaatagtaataggtgctcaataaatgtcaataacatgaatgaaaaccttcatgtcgtctaagataccaaattaggcacagaagagatttcatttgaaagaggagccttgtaagagcagggaggtactaagatgcttccttctgacctcataggtacagcctgactcttgagttaggaaggagctgacttggaatagaaggagagaaccaggtgtccttggctgcaccaacactctgaaaagacaaaggaaggaaggggtgcatgtttgctctctatacaaccagtaatgaaccattacagagctcagtgtggctctgaccagccaggcttatgttcactgtgtggctcttccttgctgggctcattctcctctggaggctctggctaaacatcagggcaacctgagcagctcccggagtgtgctgtgcttgttgtgtggtaggagcccttgggcctgagagtgttgcgatggaccacgttgttcttgctcgtgaagacagggatgactttgatcattaagaaacggccccagggaacttaccgcccttatttggggcccagcaagtcctttctcctctagcaatggtaattttagtcagttttgtgtttaaaagccagtaaagttacctgctcagtcttggcagtgagctgtttgtagcagcccctttctggtacttaccagtctcccacttttttttttttggtgagacagaatcttgctctgtcacccaggctggagtgcagtggtacaatctctgctcactgcaacctctgcctcccgggttcaagcgattctcctgtgtcagcctcccaagtagttgggactacaggcgtgtaccaccatgcctggccaatttttgtatttttagtaaagacagggtttcaccatgttggccagcacagctggtcagagccacactgagctctgtaatggttcattactggttgtatagagagcaaacatgcaccccttccttcctttgtcttttcggagtgttggtgcagccaaggacacctggttctctcctccttttccaaatcagctccttcctaactcaagagtcaggctgaggccgagcttggtggctcattcctgtaatcccagcactttgggaggccaaggcgggcagatcacgaggtcaggagatcgagaccatcctggctaacacggtgaaaccccgtctctactaaaaatacaaaaaattagccgggcgtggtggcgggcttctgtagtcccagctactggggaggctgaggcaggagaatggcatgaacctgggaggcggagcttgcagtgagccgagattgtgccactgcactccagcctgggcgacagagtgagactgtctcaaaaaaaaaagagagtcaggctgtaaatgtgaggtctcaaactcctgacctcaggtgatcctcccatcttggccttccaaagtgctgggattacaagcgtgaaccaccacacttggcccagtctcctacttttaaatgggggcagcatttgccttccaggcttttccttgtgctttccaatcaacaatgaaaaacagccagagaagaagagtctaattgtggacaggtgtttgcaagtggttgaaccaagtaaatatttccatggaactgtcagcaccgacttcttccccatagacatttgatgtcagttttcagaatgagattattttttctaatttttaccagtcaagctttgctagcaggaactgagaacattcagaagtctgcctccaaaggcaggaagtttacctagtttcatctgaatagggtgcaaggccatgccaaggggaagtatttgcattattccctagcagaacctcgtacaaggctgccaactccatccgcctagtgaggatacagtgatattcaggccaaattgaatttcttcccccggggaagattattttgctcctttgctctctgttttgttttataagtaaaaggtgtggttgtgaaatccatcttttgtgtcctgctgctgatcaatctcaacatgaccccagggagctcgggcacaggggcctttccctgaccagctcccctgttgtttcttaactggctgcctggccacctcttgctccagttgtaatgacttttgtcatgtaagcatgtctgaaaggagtcacagtcaactctcaaggtagcccttcaaacaagcgagtgattataagtattgatattcacttcccacactacgacaagaatcagcaaaaacagtagtttggtgtcagatacatttagtgactcactaagatgacattatcatttttttatacataaaaatacttgtatcttatttaagaaaaaaaggaggtaaaataattgaaactgaaagggaacgcttgggaattgtcttattaatattgctactttttttttctctctcacagttatttgggatcatgcaatgtagagtgattttttttttaattcaggaaaaaataataataattttcccctgatcacactgcaacagctaataggcttctatgcccttttcccattaatggccagacatctatgtaaagagttttgagttccgctcaagtggttgaagttgcaggctctatagtagatgttagcagtattcctatcttttataaggtactctagataaattaaatgtggttttctcctgaaaggtgtcccagctgcatctctggtgacccctgctgatgtcatcaagacaagactgcaggtggctgcccgcgctggccagacgacatacagtggtgtcatcgactgtttcaggaagattctccgggaagaagggccctcagcattttggaaagggactgcaggtaggcaggggctggagccatacagaatggctggctggctctagcgtcctcccctgtgactcagtggctgtctttaccacatttgtcctggtttcaagtctcccctgcccctgcttctctttttcagctcgagtgtttcgatcctctccccagtttggtgttaccttggtcacttatgaacttctccagcggtggttttacattgattttggaggcctgtaagtcagctgctcaactcctttacaaagaaatcactaagtccaaaacaaatgtttgttctgtctacaaaagcattgttgcaactcttagaaaactgataagacagaacctttaagaccaatgcatttaaaacagtgagcttaagaagcatttgtgttaagcaagtaaaacttgacagagtgacatcgtacataatattaagcagctatttgggggattttagggaagcagcaaatttttttaaaaaagacaggatatcctctgttgcccaggctggagtgcagtggcatgttcttggctcaccgtagcctcaacctcccgggctcaagcgatcctcccacctcagcctcctgagtagctgggaccacagaggcatgccaccacacccagctaatttttgtacttttttatagagatgggatctcactgtgttgcccaggctggtctcgaactccaccagccttggcctcccaaagtgctgggattacagacatgagctaccgtgcctagccaggaggcagcagattaaaatgctgtgtaaataattgtcttttttcacataagcaaatactgaacttcatggcgttctcattatgtggattttattatatggccctttcacagaagtaatgtaaatgtataccagtaacacttttgtgcattttctttcaaagtcccaagcccttttgcatctctgatatttcattattcaccacaatttattattagttaggtgcagatgttcttgaagctaatttactggaaaaaccaataggtttgaagagagattttgcccatggatataatcactagtgagctgtaggccagaaattgggcttctaaaagcttaccacttgaagcttgcactgagaagaagaattacaagttgaattttctgggtggggaagttgtacccaaagcaagcaattattagcttttcagcagaagaccaagtaccattcctgagtcctcacatcagaaacctgtgaactcctctgtgcccaaaggccatatagggaatcagctgctgaaccaagtggagggacctatgcaaaaaaagtgagaacagcagtcttacagttgcattgtagaaatgtgaggcttcaggcttttccatgcttctttcatcttctgtaaaagaactaaagctatttctctctctctctttttttttttttttttttttagacggagtctcgctctgtcgcccaggctggagtgcagtggtacgatctcggctcactgcaacctccacctcccaggttcaagtgattctcctgcctcagcctcctgagaagctgggactaagggcgcccaccaccgcgcctggctaattttttttttttttaatatttttagtagagacggggtttcaccgtgttagccaggatagccttgatctcctgacctcatgatccgcctgcctcggcctcccaaagttctgggattacaggcgtgagccaccatgcccggcctatctctctttaaataatttaattgataatctttatgagtctactacataaaaagttaacttctaaagttatgtcaaaagaaaaatatatactttaaaaattactttcatatgtgctaagtgcagaaaatttggaaaaccataaagcataaaagaaaaaaaccagcctgggtgtggtggctcacacctcccagtgctctgggaggccaaggcagaaggattccttagaccagaagttcgaaaccagctttggcaacatagcaagaccccatctttacaagaagaaaaaagaaaaaaatcatccataatcttactacccagagagtcttcatatttgagtgtcttttcttctgacttttttcctatggatttgtttatatatgtatgcaagcattggaaataaggccatttctcttgtaaatcaaatatgtagataagttgctgtcaaagcagctataaatcatgactgtggtttctagtcatgcagcacagatgccatggaaatggttgagagaaacattcttctttgtggcacatgggtcagaccgaaaatgtccagctgtaagctgcgctcatccaccttgagcatgctaaccattggctttttttctgtcaacagcaaacccgctggttcagaaccaacacctaagtcacgcattgcagaccttcctcctgccaaccctgatcacatcggtggatacagactcgccacagccacgtttgcaggcatcgaaaacaaatttggcctttatctcccgaaatttaagtctcctagtgttgctgtggttcagccaaaggcagcagtggcagccactcagtgatgagacaactgttgagtgtggcaaaatggcgccttgaagaaagaggcctaggagagcagccctgtaatgtatccagtcagctgcatggtactgactgagctgaggagtcaaactcttctttctgtatgacatatacatatacttgtttataaaataatcatttgcccagggaaaaaaccacaacgctgtttcaagctttagtcttatgtgttgaaatgtttttgtaagccttggcatgaattagtgttctagactctgctttgcacagcttgcacttacagtgattgtacatattgtacatctttgtacagagacatcttggcacctcatcccaacaaatcacatttgtagaaatgtaatgcggttctgagtggcttgaaatgtacagaatgttttgaaagtgttttattaagaatcacacaaaaataaatgtattaaaattaaattcattctcttattggtgacttatggaaataaagcatcaatattggatgtatttaattcctagtttgttttccattctggaataaaaaggtatttgctgataaaaggcataacgagacatagtgctgctaccactgaataagtgatactttggaaagatgcatgccagtggatgccagaggaccaggctaatgacttgtgtgtgctgatgtgtttccatttgtatttaatgtgtgtagaccctcctctgttcatcaatcaaaaagcatttcctaggcagctcctcgcctgtcagtgtgcatatggaaacagggacatctccatcattactggcttagttttgctttcctttgacacagtaaggcaaaggccaagctttcaaaagagtaaaggatactttcacaatttcccttcatatggatatgattccagtcaaaaataaaatgcacaccaaaatgt

SEQ ID NO: 51 - DNA, 2928 bp, Homo Sapiens
gtgcagacaactaagcgaggggatcctcatgagttaagaaacatatttctacagtatgccagtactgaggttgatggagagcgttacatgaccccagaagactttgttcagcgctatcttggactgtataatgatccaaatagtaacccaaagatcgtgcagctcttggcaggagtagctgatcaaaccaaggatgggttgatctcctatcaagagtttttggcatttgaatctgttttatgtgctccagattccatgttcatagtggctttccagttgtttgacaagagtggaaatggagaggtgacatttgaaaatgtcaaagaaatttttggacagactattattcatcatcatatcccttttaactgggattgtgaatttatccgactgcattttgggcataaccggaagaagcatcttaactacacagaattcacgcagtttctccaggagctgcaattggaacatgcaagacaagcctttgcactcaaagacaaaagcaaaagtggcatgatttctggtctggatttcagtgacatcatggttaccattagatctcacatgcttactccttttgtggaggagaacttagtttcagcagctggaggaagtatctcacaccaggttagcttctcctacttcaatgcatttaactcgttactgaataacatggagcttgttcgtaagatatatagcactctagctggcacaaggaaagatgttgaagtcacaaaggaggaatttgcccagagtgccatacgctatggacaagtcacaccactagaaattgatattctatatcagcttgcagacttatataatgcttcagggcgcttgactttggcagatattgagagaatagccccattggctgagggggccttaccttacaacctggcagaacttcagagacagcagtctcctgggttaggcaggcctatctggctccagattgccgagtctgcttacagattcactctgggctcagttgctggagctgtgggagccactgcagtgtatcctatagatctggtgaagacccgaatgcaaaaccagcgtggctctggctctgttgttggggagctaatgtacaaaaacagctttgactgttttaagaaagtcttgcgttatgagggcttctttggactctacaggggtctgataccacaacttataggggttgctccagaaaaggccattaaactgactgttaatgattttgttcgggacaaatttaccagaagagatggctctgttccacttccagcagaagttcttgctggaggctgtgctggaggctctcaggtcatttttaccaacccattggagatagtgaagattcgtctgcaagtagctggagagatcaccacgggacccagagtcagcgccctgaatgtgctccgggacttgggaatttttggtctgtataagggtgccaaagcgtgtttcctccgagacattcccttctctgcaatctattttcctgtttatgctcattgcaaactacttctggctgatgaaaatggacacgtgggaggtttaaatcttcttgcagctggagccatggcaggtgtcccagctgcatctctggtgacccctgctgatgtcatcaagacaagactgcaggtggctgcccgcgctggccagacgacatacagtggtgtcatcgactgtttcaggaagattctccgggaagaagggccctcagcattttggaaagggactgcagctcgagtgtttcgatcctctccccagtttggtgttaccttggtcacttatgaacttctccagcggtggttttacattgattttggaggcctcaaacccgctggttcagaaccaacacctaagtcacgcattgcagaccttcctcctgccaaccctgatcacatcggtggatacagactcgccacagccacgtttgcaggcatcgaaaacaaatttggcctttatctcccgaaatttaagtctcctagtgttgctgtggttcagccaaaggcagcagtggcagccactcagtgatgagacaactgttgagtgtggcaaaatggcgccttgaagaaagaggcctaggagagcagccctgtaatgtatccagtcagctgcatggtactgactgagctgaggagtcaaactcttctttctgtatgacatatacatatacttgtttataaaataatcatttgcccagggaaaaaaccacaacgctgtttcaagctttagtcttatgtgttgaaatgtttttgtaagccttggcatgaattagtgttctagactctgctttgcacagcttgcacttacagtgattgtacatattgtacatctttgtacagagacatcttggcacctcatcccaacaaatcacatttgtagaaatgtaatgcggttctgagtggcttgaaatgtacagaatgttttgaaagtgttttattaagaatcacacaaaaataaatgtattaaaattaaattcattctcttattggtgacttatggaaataaagcatcaatattggatgtatttaattcctagtttgttttccattctggaataaaaaggtatttgctgataaaaggcataacgagacatagtgctgctaccactgaataagtgatactttggaaagatgcatgccagtggatgccagaggaccaggctaatgacttgtgtgtgctgatgtgtttccatttgtatttaatgtgtgtagaccctcctctgttcatcaatcaaaaagcatttcctaggcagctcctcgcctgtcagtgtgcatatggaaacagggacatctccatcattactggcttagttttgctttcctttgacacagtaaggcaaaggccaagctttcaaaagagtaaaggatactttcacaatttcccttcatatggatatgattccagtcaaaaataaaatgcacaccaaaatgt

SEQ ID NO: 52 - protein, 645 aa, Homo Sapiens
MTPEDFVQRYLGLYNDPNSNPKIVQLLAGVADQTKDGLISYQEFLAFESVLCAPDSMFIVAFQLFDKSGNGEVTFENVKEIFGQTIIHHHIPFNWDCEFIRLHFGHNRKKHLNYTEFTQFLQELQLEHARQAFALKDKSKSGMISGLDFSDIMVTIRSHMLTPFVEENLVSAAGGSISHQVSFSYFNAFNSLLNNMELVRKIYSTLAGTRKDVEVTKEEFAQSAIRYGQVTPLEIDILYQLADLYNASGRLTLADIERIAPLAEGALPYNLAELQRQQSPGLGRPIWLQIAESAYRFTLGSVAGAVGATAVYPIDLVKTRMQNQRGSGSVVGELMYKNSFDCFKKVLRYEGFFGLYRGLIPQLIGVAPEKAIKLTVNDFVRDKFTRRDGSVPLPAEVLAGGCAGGSQVIFTNPLEIVKIRLQVAGEITTGPRVSALNVLRDLGIFGLYKGAKACFLRDIPFSAIYFPVYAHCKLLLADENGHVGGLNLLAAGAMAGVPAASLVTPADVIKTRLQVAARAGQTTYSGVIDCFRKILREEGPSAFWKGTAARVFRSSPQFGVTLVTYELLQRWFYIDFGGLKPAGSEPTPKSRIADLPPANPDHIGGYRLATATFAGIENKFGLYLPKFKSPSVAVVQPKAAVAATQ

SEQ ID NO: 53 - DNA, 1724 bp, Homo Sapiens
ggccctgctcgctcactcgctcgtccccggcttccgagcacagcatggcggtcaaggtgcagacaactaagcgaggggatcctcatgagttaagaaacatatttctacagtatgccagtactgaggttgatggagagcgttacatgaccccagaagactttgttcagcgctatcttggactgtataatgatccaaatagtaacccaaagatcgtgcagctcttggcaggagtagctgatcaaaccaaggatgggttgatctcctatcaagagtttttggcatttgaatctgttttatgtgctccagattccatgttcatagtggctttccagttgtttgacaagagtggaaatggagaggtgacatttggtgtcccagctgcatctctggtgacccctgctgatgtcatcaagacaagactgcaggtggctgcccgcgctggccagacgacatacagtggtgtcatcgactgtttcaggaagattctccgggaagaagggccctcagcattttggaaagggactgcagctcgagtgtttcgatcctctccccagtttggtgttaccttggtcacttatgaacttctccagcggtggttttacattgattttggaggcctcaaacccgctggttcagaaccaacacctaagtcacgcattgcagaccttcctcctgccaaccctgatcacatcggtggatacagactcgccacagccacgtttgcaggcatcgaaaacaaatttggcctttatctcccgaaatttaagtctcctagtgttgctgtggttcagccaaaggcagcagtggcagccactcagtgatgagacaactgttgagtgtggcaaaatggcgccttgaagaaagaggcctaggagagcagccctgtaatgtatccagtcagctgcatggtactgactgagctgaggagtcaaactcttctttctgtatgacatatacatatacttgtttataaaataatcatttgcccagggaaaaaaccacaacgctgtttcaagctttagtcttatgtgttgaaatgtttttgtaagccttggcatgaattagtgttctagactctgctttgcacagcttgcacttacagtgattgtacatattgtacatctttgtacagagacatcttggcacctcatcccaacaaatcacatttgtagaaatgtaatgcggttctgagtggcttgaaatgtacagaatgttttgaaagtgttttattaagaatcacacaaaaataaatgtattaaaattaaattcattctcttattggtgacttatggaaataaagcatcaatattggatgtatttaattcctagtttgttttccattctggaataaaaaggtatttgctgataaaaggcataacgagacatagtgctgctaccactgaataagtgatactttggaaagatgcatgccagtggatgccagaggaccaggctaatgacttgtgtgtgctgatgtgtttccatttgtatttaatgtgtgtagaccctcctctgttcatcaatcaaaaagcatttcctaggcagctcctcgcctgtcagtgtgcatatggaaacagggacatctccatcattactggcttagttttgctttcctttgacacagtaaggcaaaggccaagctttcaaaagagtaaaggatactttcacaatttcccttcatatggatatgattccagtcaaaaataaaatgcacaccaaaatgt

SEQ ID NO: 54 - protein, 258 aa, Homo Sapiens
MAVKVQTTKRGDPHELRNIFLQYASTEVDGERYMTPEDFVQRYLGLYNDPNSNPKIVQLLAGVADQTKDGLISYQEFLAFESVLCAPDSMFIVAFQLFDKSGNGEVTFGVPAASLVTPADVIKTRLQVAARAGQTTYSGVIDCFRKILREEGPSAFWKGTAARVFRSSPQFGVTLVTYELLQRWFYIDFGGLKPAGSEPTPKSRIADLPPANPDHIGGYRLATATFAGIENKFGLYLPKFKSPSVAVVQPKAAVAATQ

SEQ ID NO: 55 - DNA, 2984 bp, Homo Sapiens
ggccctgctcgctcactcgctcgtccccggcttccgagcacagcatggcggtcaaggtgcagacaactaagcgaggggatcctcatgagttaagaaacatatttctacagtatgccagtactgaggttgatggagagcgttacatgaccccagaagactttgttcagcgctatcttggactgtataatgatccaaatagtaacccaaagatcgtgcagctcttggcaggagtagctgatcaaaccaaggatgggttgatctcctatcaagagtttttggcatttgaatctgttttatgtgctccagattccatgttcatagtggctttccagttgtttgacaagagtggaaatggagaggtgacatttgaaaatgtcaaagaaatttttggacagactattattcatcatcatatcccttttaactgggattgtgaatttatccgactgcattttgggcataaccggaagaagcatcttaactacacagaattcacgcagtttctccaggagctgcaattggaacatgcaagacaagcctttgcactcaaagacaaaagcaaaagtggcatgatttctggtctggatttcagtgacatcatggttaccattagatctcacatgcttactccttttgtggaggagaacttagtttcagcagctggaggaagtatctcacaccaggttagcttctcctacttcaatgcatttaactcgttactgaataacatggagcttgttcgtaagatatatagcactctagctggcacaaggaaagatgttgaagtcacaaaggaggaatttgcccagagtgccatacgctatggacaagtcacaccactagaaattgatattctatatcagcttgcagacttatataatgcttcagggcgcttgactttggcagatattgagagaatagccccattggctgagggggccttaccttacaacctggcagaacttcagagacagcagtctcctgggttaggcaggcctatctggctccagattgccgagtctgcttacagattcactctgggctcagttgctggagctgtgggagccactgcagtgtatcctatagatctggtgaagacccgaatgcaaaaccagcgtggctctggctctgttgttggggagctaatgtacaaaaacagctttgactgttttaagaaagtcttgcgttatgagggcttctttggactctacaggggtctgataccacaacttataggggttgctccagaaaaggccattaaactgactgttaatgattttgttcgggacaaatttaccagaagagatggctctgttccacttccagcagaagttcttgctggaggctgtgctggaggctctcaggtcatttttaccaacccattggagatagtgaagattcgtctgcaagtagctggagagatcaccacgggacccagagtcagcgccctgaatgtgctccgggacttgggaatttttggtctgtataagggtgccaaagcgtgtttcctccgagacattcccttctctgcaatctattttcctgtttatgctcattgcaaactacttctggctgatgaaaatggacacgtgggaggtttaaatcttcttgcagctggagccatggcaggtgtcccagctgcatctctggtgacccctgctgatgtcatcaagacaagactgcaggtggctgcccgcgctggccagacgacatacagtggtgtcatcgactgtttcaggaagattctccgggaagaagggccctcagcattttggaaagggactgcagctcgagtgtttcgatcctctccccagtttggtgttaccttggtcacttatgaacttctccagcggtggttttacattgattttggaggcctcaaacccgctggttcagaaccaacacctaagtcacgcattgcagaccttcctcctgccaaccctgatcacatcggtggatacagactcgccacagccacgtttgcaggcatcgaaaacaaatttggcctttatctcccgaaatttaagtctcctagtgttgctgtggttcagccaaaggcagcagtggcagccactcagtgatgagacaactgttgagtgtggcaaaatggcgccttgaagaaagaggcctaggagagcagccctgtaatgtatccagtcagctgcatggtactgactgagctgaggagtcaaactcttctttctgtatgacatatacatatacttgtttataaaataatcatttgcccagggaaaaaaccacaacgctgtttcaagctttagtcttatgtgttgaaatgtttttgtaagccttggcatgaattagtgttctagactctgctttgcacagcttgcacttacagtgattgtacatattgtacatctttgtacagagacatcttggcacctcatcccaacaaatcacatttgtagaaatgtaatgcggttctgagtggcttgaaatgtacagaatgttttgaaagtgttttattaagaatcacacaaaaataaatgtattaaaattaaattcattctcttattggtgacttatggaaataaagcatcaatattggatgtatttaattcctagtttgttttccattctggaataaaaaggtatttgctgataaaaggcataacgagacatagtgctgctaccactgaataagtgatactttggaaagatgcatgccagtggatgccagaggaccaggctaatgacttgtgtgtgctgatgtgtttccatttgtatttaatgtgtgtagaccctcctctgttcatcaatcaaaaagcatttcctaggcagctcctcgcctgtcagtgtgcatatggaaacagggacatctccatcattactggcttagttttgctttcctttgacacagtaaggcaaaggccaagctttcaaaagagtaaaggatactttcacaatttcccttcatatggatatgattccagtcaaaaataaaatgcacaccaaaatgt

SEQ ID NO: 56 - protein, 678 aa, Homo Sapiens
MAVKVQTTKRGDPHELRNIFLQYASTEVDGERYMTPEDFVQRYLGLYNDPNSNPKIVQLLAGVADQTKDGLISYQEFLAFESVLCAPDSMFIVAFQLFDKSGNGEVTFENVKEIFGQTIIHHHIPFNWDCEFIRLHFGHNRKKHLNYTEFTQFLQELQLEHARQAFALKDKSKSGMISGLDFSDIMVTIRSHMLTPFVEENLVSAAGGSISHQVSFSYFNAFNSLLNNMELVRKIYSTLAGTRKDVEVTKEEFAQSAIRYGQVTPLEIDILYQLADLYNASGRLTLADIERIAPLAEGALPYNLAELQRQQSPGLGRPIWLQIAESAYRFTLGSVAGAVGATAVYPIDLVKTRMQNQRGSGSVVGELMYKNSFDCFKKVLRYEGFFGLYRGLIPQLIGVAPEKAIKLTVNDFVRDKFTRRDGSVPLPAEVLAGGCAGGSQVIFTNPLEIVKIRLQVAGEITTGPRVSALNVLRDLGIFGLYKGAKACFLRDIPFSAIYFPVYAHCKLLLADENGHVGGLNLLAAGAMAGVPAASLVTPADVIKTRLQVAARAGQTTYSGVIDCFRKILREEGPSAFWKGTAARVFRSSPQFGVTLVTYELLQRWFYIDFGGLKPAGSEPTPKSRIADLPPANPDHIGGYRLATATFAGIENKFGLYLPKFKSPSVAVVQPKAAVAATQ

SEQ ID NO: 57 - DNA, 21418 bp, Mus Musculus
  misc_feature (2559)..(2635): n is a, c, g, or t
  misc_feature (16642)..(16661): n is a, c, g, or t
ggccgggtctggccgagctgggctgggtctggctgagcagagcagagccgagccgggcaaagctcgacagggaggctctgggcggagggtagtggaaggcggtagcctggtggcggcgaggctgcggcgacagagatccgggagagagttgctgccggctggagcgcgacctcttgcctggtggaagttagtgactgtcggtagaggcagcgggagggtgggtgggggtgggggatgggaattgtggtccgagacaaggctcttgttgggatatttttcatagtgaccaagtagccgtgagaccttggggcaagttcagaaaaccttcggaagtttttgtttttgccgcactgaagagttcccgctgtagaccgaacatttatttgtcaggccttcgaatggctcagggtggctgctcctctggtggactgtattcaggctttcaagtcgggggttctgggggggtgggaggggagctcctacctctgcttgtgatgtccccaaacattaggcaggatgtgtgtgtgtgtgtgtgttttttttcctatgtggcatgtgttgccattgagacctgccttatcttcttacccatgggtagtttcgcgggttctgtgaatgaaaggatgtatggacggtattttggcggggggtgggtgttgggggtgcgtgggcgttgtttttgtttttccatgtttgggaatgaattctagataacattctatggctcaaccgcattcgctggtcatgtatgaaagtttttattttccaaatcctcacggcctttctcctgaggacccctttccctcggtgtctttttcccaagcttcctgtaccaggctacttctgcctcattttccaggctccatggttattccatggcgtttcttgctcaacccagagacagctggaacaagagggctcattgaagtcgagagcttgccaaaggaatttcccacacatcactaccagtggtcctctctgaagctcaggacaggatttgtggactcacttcacctcagaccatggcaagcaagggcttgcccctttacttggccaccttgttgactggactcttggaatgcatcggttttgctggtgtcctctttggctggacttcactgttgtttgtgttcaaagcagaaaactacttttcagagccctgtgaacaggactgcttgctccagagcaatgtaacagggccttctggtaaggacaaagatggctttttcataggaagctgtgcttggttcctgggagttgggaaagaataggaaggtctctgtgctttacccaccctgccagcctttccatgggggggggggggactgtcagccccctctcaccccttatgtggaggctatcaaatggggaaggaagcacctggttttagagggggacctttagagaccaatatattttaatgcaccttggtagctttctggtcagcaaagttgttcaaggtagaggggagtctggtctgggcactgacctggcaggaaggttggggtgcgtcagattctgtctcacataatcagggttcctaagagcttttctctcccagatttaaaagcgcaggatgagaagttctcactcatctttaccctggcatccttcatgaataacttcatgacctttcccactggctacatctttgaccgcttcaagactactgtggcccgcctgatagccatgtaagcctgggcagaagcaagggagagggagtggtgtgtgggagaccagatagtggtgaggcagcagtctggcttagaggcaaaccctgccccagcagcagggtcaccgtccttagcaccaccctcttcctactgctggcttcctttccctttgcaccttcccctgtagtgtcctatcctgttatatgctcaacttcctgagaggccagggtttcaaaattaacaatgtatagtcgataccatctgctttccttgttccttgaatccccagtctcttttctggcagggcctcacatctaggtggctcaggctttgccttcattctctgctgcttatcattttctgagttgtcccacccaatggtgaaatttcaggtgccctctaattagtcaggagcctcttacactgggagattcccctgcaaatgagtcagagacctcgtgctcttttacagggttctgttgcctcctgattacagtagtgtccatggctaggttcattgataagcaggtctgctaagtcccaatacagcccatgtaggagcagatatgtggtgaggcaaagaaagagaaaaggaaagtagagagtaaagcaaattccttacacttaagctttggggagaataagtccttacacagaaactcgaattttgtttcctgtagtttcttctctgccacgtgtcttttgaacttctgctttctttctttttttcttttctttctttctttctatttgtttttttgtttttttgagacagggtttctctgtatagccctggctgtcctggaactcacttttagaccagaactcagaaatctgcctgcctctgcctcctgagttctgggattaacttcggctttcttcttcnnnnnnnnnnnnnnnnnnnnnnnnnnnnnnnnnnnnnnnnnnnnnnnnnnnnnnnnnnnnnnnnnnnnnnnnnnnnntcctcctcctcctcttcctcctccttcttcttcttcttctttttagatttatttatttattatatgtgagtacaatgtagttgtcttcagacacaccagaagagggcgttagatcccattgcagatggttgtgagccaccatgtggttgctgggatttgaactcaggatctctggaagagcagtcagcgctcttatccgctgagcccctgaacttctgctttctatttgttatctatctttacaaagtcctccaccactaagggggcccaagaacaagaactttggcatttatgctagaatcacttgaacttttttgaactttttttttttcctgctggggattgaacccagggattcatgaaaggcaggcaagtgtctacttctgtgttggtgactttcttgttactgtgattgatatgtatatatgtataaaaccaaagcaacttagaaaaggaaacattaaattgagcttatggttccagagtctatgacggtgtagggaaggcttggccttaaggctgccggaacagcagtaagaactcccatctggtccacaaccaggaagctgagagtacactgggggtggcatcacacagccagccacctcctcaaacaaggccatgcctcatagtcctctccaccaactggaaccaagtatagaaatgtatgagcctgttgggggcatagtcattccaaccaccacaacttctaagccacaccccgagctgtgaacgccatgactttgaatttggaatcaagatcattctgatccaggcgtgtccaacccttctgacattgtgacaccgagttgtcacctgaactcttcaacaatcatgcagtccagttacacacacacacacacacacacacacacacacacacacacacatctcgataactttttttttttaactaggtttatgattctcttagttcgacttcataactatccttggttgcatgttgactaaccctttccttttccaggaaaggctactgaggcccagaggaaggcagtaccttgtctaaagtcacatgtggagatgaaattagaatttaaggttttgatttgcaggccaggcaccagccccctttcccaaggggttggcctcaggacaagaggccctgtgccttgcctactgtagtcctgagtcatttacacatcagttgcgctcattatccaagatttcccagtttagccgtagatactggactctggactagttactttcttgttactgggataaaatacagcaacaaaagtgactcgaggagggaagccttctcatggctccaggctctggtccatcatggtaggataccccagcagcaggagcttgagggaagctattcacattccatctgaagtcacacagaggatgggggagctgagttcagtttccctgttttatacagtccagaatcctctgccatccacatagttccactccggtccagataggtctcaacagtatcagttaatgtaatcagcccattgcccaggtgattctaggctctcattgagttactgctgagatctactatcacatgtattagctatggggtcaggattacctctcagtctatcgggccttctctgattctgacctctcagaagtgcctgttcccctggagttccctggctgtgtacagtgctgtcaacttctagctagtgttggatgtcagctgagccgactcctgcttggtcctcacatttcttcttttaactggatgcttctgtatttcagatttttctacacctgcgccacgatcatcattgccttcacctctgcaagtgaggatggacagctgggagggagggacaactggggtgtggatggctgggccaggtacagaaggcaaagggcccatgatattttcatagacccacattgtctgtggaaaatttatcctactgaagagagaattatagctatacagtattaaaatgttctcctgtggggtttttgggtaacatgtgtgataattttgaaaatcatcttcacttagcagaatcaaaatcaacaaccctggtacatgcaaaaaattgcgcccagtgattcctataaaagtctgtgcattccaggcttgcctggtttcctttcctttgtatgggggggagaaaaatcgagataagatgagggtgagcagggactagtttaatggctcctagggccctggataaatatgtgggaagtggacctagaagcaggaggttagattggccaagagataactcgcaacattcttccccaggggcagattaggtggcttcattttgagggttgagaaatgaaaaatagtgagatctgttgtgtaacagctgtaacagaaccagttgatgtcatgagggagtttctgcttgtgttcagccaacccaggggcttggtgttttggtctaaacaaatctcatgaagtcacatttgtaagaattgagcaataagctaagcctatttatttattatttaattaatttattaatttatatcattacttatgtgtgtacttacatttgtgagttttgagcaagaatcccgttacttatttatattgacatgtgctctcacttgagtgtgcatatagagggtgtggcttgcttgcttacatctaagtagaagccagaagtctaaccttagccccctcaggtgtcctgtgtttttgaagcagcatctcttgctttgtgtctaactcactcgctttgtgctggttaggctatactgctggccacagagcctcatgcttgctggaacattctttactgattaagccaacacccgggctgtcttagtcaatgttgcattgagacacatgaccaaggcaactcttataaaagaaagcatttgattggggctggcttaaagttccagaggattagtcaattgtcagcatggtgggaagagcgttggcccactgggagacatagtgccggagaggtagctgagagttctccaactggatctgcattcagtaggaaggagagagagagagacatgggtctggcttaggcttctgaaattcggaagcccacgtctaagtgacacacttcctccaacaaggttacacctcctagtccctgtcaagtactccactccctaaagaccaagtattcaaatatatggacctacgaaggccattcctattcacattgccacactagccgagcaaaagtctttcttcctccttaaaacaggacttttgttttggggaaagtattgatgctaggatgattttactgtgaaactgatatccaatctttagctcattaggagagatgtacatttgtaaacaacagaaaatgaatggcaaatagcatgactcatctctaaaatcatctctttccagagcttctctaggcattgaacagtagtttcttaagaggaggtgaagaggttgccaagatatctcttagtgggtaatgatacttgccaccaagtctgatgacctgaatttgagtcccagaacccagaaggagagaccaaacacctacaagttgtcctttggctttcacatatacaacactgtgcacacacacacacacacacacacacacacacacacgcacgcacgcacatacattgctacacacacacacataatacacatacattaccacacacatacataccacacacccacacatacataactcatacacacatacataacatatacaaacacacaaataaaatgtgagaaaaatagaggatgctagaacagacctaatacaccaataagcattggattatctcatgcaaaaaattgttcctttaaaaaaagatttatctatttatttatttacttatttatttatttattttatgtatatgagtacactgtagctgtacagttgtgagccttcatgtggttgttgggaattgaatttttaggacctctgcttgctctggtcaaccccgctcactccagtcggcccagcttgctctggtcaactcttgctcagtctctgctcgctccagcccaaagatttatttatttttatacataagtacatggtagctgtcttcagacacatcaggagagggtgtccggtctcattacggatggttgtgagccaccatgtggttgctgggatttgaactcaggaccttcggaagagcagtcagtgctgttacttgctgagccatctcgccaggtcaaaattgctcccttttaagactaatttttcagtgatttgtagtcatttagagattatgcaacacttaggaggcctgctgcttgcatgccagtttcgcttgcttgtttgattttgttgttttgtttagaaccaggaatatccttactcctgcagcatttcttatgccaagcaccataccacagggcagggctcaaattttcacaaccaaagggaaggatcccaggcatttctctctcggttgtcacagtgcttcagtggagcaggatagagtctctcatttctgttcatagtgtgaggagagcgaggcgaatttggaaggtagctcacactcatggtgaagcagtgactttgagactggacttgaatgctgactccagagtcctcttctcccacagtggtggagcaggcactttttttttttttttttggtttttcgagacagggtttctctgtatagccctggctgtcctggaactcactttgtagaccagtctggcctcgaactcagaaatccgcctgcctctgcctcccaagggctgggattaaaggcgtgtgccaccacgcccggctggagcaggcacttattatggtctactgcagacccatagctgcctttggaaaggagaagggggtctcaggacacttgagaaggagtgactggagagtctcttgaccactccctcaggccctcaaaggacaccagcaagctggtgaagtgagctgccagtgctactgtgttgttggaagttggaagctgatgggagccgcagccttctggaggagaggggagaaagtacagcttcttgggttgtgggttccaatgaaattactactcactcctgtgacttttatggttctagacactgccatgctgctcttcctagccatgcccatgctcgcagtgggaggaatcctgttccttatcaccaacctacaggtgtgagctgtgtccccttccttgatcccaggcagctgagggaggtgcagacatcatttgtttccagaggggttgacccaaactagagtggaaggatttggggtgcgagagggtggaggtattaatcacgcctgggtactgaggagggtaaagatgtgtttcatgaataagtcagctaagtttgtcttgtcttctccagattgggaacctctttgggaaacaccgttcaaccatcatcaccctctacaatggagcatttgactcctcctcagcagtgttcctcgtcattaaggtaggaataccagaagctgggcctgaggggataacctagtccgtaaagtgcctactgtgcgagcacgactacctgagttagattcccagaatccttgtgaaaaggctgagtgtcctggtgtgcgcttgtaatcccactttggagtgttacaaacaggcaaatctcaaggccactgtgagactctgtctcctgatgaatgattctcactactgtcctccggcctccagacactttcacacacacaatactaacttaacatttattgaacacttgagcctttattaattccagttgcttgtcctgtgagccctgcatgacttctgccagccctggaggtaggcacgttcctcctcaggtgacacacttagagtattatggagatcatgatccctgtcggaggttctgcagtggcaactatggcatttgaacctgcacttaggcctgtttgtctctagagatgtgcttgggaccactaaaccccttctttacactaagcctatatataatctttgctcagtgaagaaggaagatgtaatcatgatatacttgggtcagggatggacagaaactgggaactctgtaaaaagtaacatttgctgatgtgtgcttccaccttggaaaagtgggtaggaaagggtagtgaaggccttagagactacacaggggcctttctatctctctagggctggtgtgagtatcaggagaacaaactgttggcaagcatattagaagcccattaacaaccagtctgctaatggttttgttttttattaaattaattaattgttattatcatttaagaaaagacctcttaagctggcccgagactcaccatggagtccgatttgttcttaaactcacgatcattcgtccttagccttctaagtgctgggattatagatgtgtgtcacgacacctagattcaattaattttttttttttttgagacagcatctgactgtgtaggacaggccagactgaatcttatagcctaggctagccttaaactctcaatccgtttgccttaggctctctagtgctatggttataggcaggaatcaccatgcctggctttgttaatgattttagtgtttaagtcattgctaacagttttatttggctagtgtcttgcctaacccttggtatgatttctggttggtctaagctaacaatggcaaactctgtctctactaccactgacaggtagaggaaggcatgccatgtccttgcaaggagataaagtgggtgtatagtgtagaacttcaggggacatttcctccctgaaggagggtttgcgaaagcagagtagaagaaaaacctttagtttggaggctagctcagctgttagaatgtctgcctcgaaagtacaaagccctgggttcaagccccagcacaaagccctgggttcaagccccaacgctgcataatcaagcttggtagcatacctttaatcctagcacctgggagatgagggcaggaggatcagccagtcaaagtcatcttatattatacagtgagccaatgtattatattacattataatatgtataatatacatattatattatagcagtgagcttgaagcctgcttgacctacccaagacccagttgcaacaacaaaagcctttttccctgcctctctctgatcttcctctttgaagaccgcagtgggaaggaaggcgtagtagtcgacacagtagtagccaggctttgattgtgtggcaaccagctggaacataacgactggcaacgggaacgaaaaaatggtggaccccgaactgtccaacctggggttctctctgggcttttgttaggccacttatgggctcatgagcctcatttagtcccatgagcaccttgacaagaaagtctgagtccctgagggtctccagaccctttgctggtggtgcaagagccgttttccaggtccccttcccttcccaggtaaagcttacctgatgcacctccttctctttgaaggcagaagggaggggctggagcaggagtggggttctcagtttaatatgacttgttcttttaaggttcatctgtactggggtgtgtgccatgatattcctccttttgtgaaggctgtggtatagtccatcaagtggctatagcacactttgctcattcattcacctgtttctctctgcacttttgactatggtctgtagtgctcctgggagtactgctgttatcctgatgtgttactcttttctccacagctgctttacgagcagggcatcagcctcaggtcttccttcatcttcatgtctgtctgcagtgtctggcacattgcgcgtactttccttctgatgcccaagggacatatcccctacccactgcctcccaactacagctatgggtaagcatgattgaccactatcccatctgacctgaggtaggaaaaaggaaagagtaagcctgctgtaggagaagagtgtattcatttgctactcctgcataacgagcatgccaggcatttaatttttctttttttttttttaaagataaggttatttctattttgtgtatatgagtgttttgcctatgtaaatgcatgtgtaccgtgtgtaccactggtgtccatggaggtcataaagggtgtcaagttgcctagaactagagttacagatgggtgtaagctgctatgtgggtactgggaaccaagcctgaatcctctgaaggagcagacagtcctcttaacggctgagccatgtctccagctcctaagaatttatttcttacatctgagccagacttggatgagcttatcatttatgcctccaatcatctgatgtgttagcagggagttggctggatttggagtaataggaatgtctttgtcacaggctaatgctccagcattcttgcttaggtgtgtgtacatagtggttctggggttcagagagggggcagtaatgtgcacagttttttgaggcttcgacttggaattgatgtgtcacttgtaggctacattatcttggctggagcagttcacatgtctaggctagataatgatgagaaatgggtagcatcccattgccaaagatggaggcagaggaggtgggatgccatggtgggatcacaccagctgtcagttagagagagccaagggggcatcttcatttgctgttcacttgctattagttgtaccccatacgctctttgagttcattctcagtctcatttcctactgatagccatgtactgatgggcatgcactgatggctgtgtactgatagctgtgtgctggtgcctgaatactgatagttgtatactgatagttgtgtactgatagttgtatactgatagctgtatactgatagctgtatactgatggctgtgtgctgatagccatgcctttggttttcatctgtgaaaacgaggctctgagaggtaaagctggagccacatgagaaagattcagagccgacacttgtaataagacccattctcttcttccatacttctaggataccccaaacttgtatatctatcagaatctctcagatcattacaataaaaaataaaatggaaacatggaaagctggctattagtcaatagacgttctgattcagttggcctaggttgccatctaggttgttgagaagtgattccgtgtgaagatgaggatcctctctctgtgctctttcctgggcttgttctggtcaggctcacagtccttgggctgagggctggagattctgtttccacagcttgtgctccaggtttggtgctagcaagaaagagaataaagcagctgaacacgaaaccaaggagctgcggtcaaaggaatgtctgccacccaaggaaggtgagttctgcttcacccacgtccacggccgcccccggcagccccatgcatgccttggtagcttctcatctgctttcaaccccaggaagtcgcctcaggggttgagcatgaggccaggctgtgcaaggaagagcccataagcagttttcaaacccctcacttttagagaggacccagaaagggcagggtctttgtgtgttttcagtgcctctttcctacttagccaccccataccccagctctcctcacactgaggtctctcttccactgccctgatccctaccctctggtcttgctctctcccgggattctagggcaccaaggttggcatctgtgtctccatttctttatgactcttggctctgatctctttccatccgtaccatccccatcacttcctcctttccctcctctgtctgctctgagtctttgcttatgaatattataaaccattgttagctacagtagaagtaaaaataggaggaggagggaggggttggagggaggcaggtcatagggcagaagtagcagctgggcaggagaaagcagtttccagagcagggcagttaatagaattacattgtatttgagatatattttttttctatatgagcagattttagctgttcttggcacacacacaaaaaaaatgggcaacaatgtgaggtgatggatatgttaatttgctttgctatggtaaccattttactatctatatgtacccgatgacagcatgttgtgtgctttaaatacacacaataaaatttgttaaaaaaaaaaaagaataggggccagggttgtagctcagtcagtagagcccttgcctagcatatgcaaagccttgggttcaatcccagcactgtatacatctaggcataatggaaaggaggatcataagttcaatgtcaacatcgtgagttctgggctacagaagaccctgtctcaaacaatacaaagaggatagtgaacctgccaggccacagaggtgtggaaccaggctgcctctgagcatttctgtatattaaagtcttagccagtctgcctacttagggagaatgagttaattggtcaactgggggaggaacagaatatttaattcacggttccaattggaccagagagaacaagggagtcctaaggaaatgagggattctgggaccaaaagaaaggtaggagatgcagagtggaccacgacaacagctgtccatcttaacccctctctgtcccagcattctccttggtttccattacgtcatcttggctgagaaccatcaggaaagtactatagcaagaagtgtcattgagcaggctgtgagagagatcagatttcaatataccaaggaacaggatgggagccatccaaggtagaaggacaagatgacaagcatggtggaaggctgggggagttttagttggctcatagaagacaagggtgcactgagaacttaggcctgagactgtcttgttaagggctactctggcctatcctacccttcttctttccctgtcatttatgccaagttcctcccttccctatcagagaactctggaccagaacagcagcagcagcaggagcagcagcagcagcagcagcagcagcaggagcaacacgagcaacactcttttcgacgctgcgcgctctctcgtcgattcatcttgcacgtggtgtggctgtctatcatacagttgtggcattacctcttcattggtactctcaactctctactcaccaagttatccggtggggacaaagtggaaggtatgtgggcttcagaggagtctcaagtaggaacttagagcccagagagactcaggaacagatgctgtgccagcaaagctatgcattccagagtggtttcgggggtggggttatgggtgggggtctgaggaggagggctggagagaagggtgagacgggaaagtcttctattgtgaagtagcctgaacattttttctcacctaacccctattttttgtgccttcacaagtcagtgcctacacaaatgcctttgccatcacccagttctttggcgtgctgtgtgccccctggaatggcttactcatggaccgccttaaacagaagtatcagaaggcagccaaaaggacaggtaagcctgggataggggagccaggaggagagatcttcatagacttccacagtcgccttgtctttgcctttaccctttctccctgactggttcatccatccattcaaccattggtcatacattttgtgccagccactgttccagtcccatgaggctttatcccagcacttgagaggcagaggcaggcagatttctgaatttgaggccagcctggtctacaaattgagttccaggacagacagtgctatgcagagaaaccctgtctcgaaaaaccaaaaaacaaacaacccccccccaaacaaacaacaacaacaacaacaaccaaaaaacaaaaaaaacaatggatgaggcaggtaattcttgtcgtcttcagctgtcctaatctagaggtagtagaaatccatcaagtatagatggcctgttactgatggagtgctggagtccttgaccaggcagagtcattcccacacagccatgctgttttcctatttccattgttcacaaatcacacgagatagccaacactttattgaacagtgggcttactgttgggtgggtttgcccagctgatgtgaaatgttctgaacatatttgagctagtgtacgttgagccgtgatactctataggctaggtatgttaaatgcattttcagcttgctggtatttttggcttccgatggttttttccgcatgcagttcctctgtgagtcatggagcctctgcgagcatgcagcatgaacgggcagcagactatggataccaagaagggcgagttgcctgctctgggagaggcagggttgttatcagggaaggcttcttcagaaccaggatagaaaagacaaagaagggaggggaagggggaaaagactgatggtggctaaagaccacaatagcgtgacagagctgacagagataggtgttcaggaatctccatcctttcctcgagtgactcaagctaatcagagggcagggcttgagagagttgcaggagaaacctgcagagtgcataagaaggcttcaggctagcccggcattggtggcacactcctttaatcccagcactggggaggcagaggcaggcagatttctgagtaggccagcttggtctacagagtgagttccaggacagccagggctacacagagaaaccctgtctcgaaaaaaaagaaggcttcaggctcctgactctacctcagagttagaatgtgctccttggtgtgacccgggagcagagggatgctgggatacttcaccctgtgtgggctgagagagaagggagaaaaggagggagcaccggtgactgtttgctttgtctccgtcctcctcccggctctctgcaccctaaccccgccgcaggattacttgcaagtacttcataggctctccttaataaaaacagtctccattcaatcaatatcaccaccacaaaaatccccattaattcttaatattttctaataagcagctaactgcctttcacctctcccggctgacttcagtacattgtttcctgactgagctgttcaatggctccatacacagacaactttctcaaagttgaaaggacaaacttcaattgacgtgtccttcataacttcatttttaaatatttatttaagacagggtctcatctagcttaggctagtcttcaagttactatgtatccaaggctggccttgaacttctgatctttctttccaagtgctgggattacagccttactaccatacccagctaacagactttttctccctcttcttttttggtactgggagtagatacctgagtctcatgcatgccaagcaaatactttgccaatgagttgtatctccagcccaaattcctttctttcacaatttacgtcagcacccctcctcttgtctatttgttgaagaaagtgggatatttttcctcagatttcccacatttggacttggcatcttttgggtatttcatgaatgggttcttttgattgggcattttctgtaaataggcagattcaaagcttggaggaaactctggttttttttttttttttttggcaagagtaagtagaaatggagttgtggcctctctggttccttcacaggtccctgctatttctggtcttcgctgttatgacactgagatagatcagttgcttcagaacttggtctgatccatccattataaagtttcccatcagcccaagcagctaatgattttgcaaccactgtgatcaatttgagagccatgatttgattagggtgctatttccatctttcctctggcttttagcagctacaattcctccagaagacacagcttctcgccctgtttctctacactgaggtaaatgcttgccttcctcctctgcttaaccagtttcagaatgacacactgaccacacatcccaccagagacaagtgggattgctgtctttagagtccagctgtgtacacactgaagctcaatggtctcgttttgtgtctgagtttttataactttatgggttttatttaaaaaaaaccaaacactttgcctttgagaatttcatacgtgtataccgtgaggatcttacttgatccttccctcccctcccctgcgatgaaggcagcattgcatccatacaggaaggagcggctgaccacttgcaggatgaaggtggcgtactgtagctgcatgacaggaatggaggcacacagggcaaagccnnnnnnnnnnnnnnnnnnnnctcccctcccctccccttctttttgagggagattgtttgaaaacacatttaagccctacaatctatctgacgtgctcgcatcctgctctgccttcctcttcagtgctgggggctggagatggggctcagggctctcgtgtactctgcaaatgttcttcctctcaactgcaatctggtctccactgtgtgtgtgtgtgtgtgtgtgtgtgtgtttaaattggctctcactatatatccctagctgacctagaactcattatgatccggctggctttgaactcactttgaacagaactttgagttctgtttgctcagtgctgaggttaaaggcatataaggcatatgctactgcgagggtgagtgggtgcatgttggggtgtgctggcaaagttcagaggataacttgcggggctcagttttctcctactgtgtggatcccagcaatggaacatgggttgccggggtggtgaccggcacctttacctgctgagccatctcactggccctcaccattcttcttcaggcttgcatcgacccatctttggccactagaaactttaccagtctaaaatatgggacccttaggcacggctcaactttagtcagtgcccttgctgtctagtgctgtgaaaggtttgggtctgtctaactggacatgtctcctggaccacacttgaaattggccatttctccaaccagtattggctatctagtgggaaacaatatttagaatcttcaggttaggtgttgcactggctagttttgtgtcaacttgacacaggctggagttatcactgagaaaggagcttcagttgaggaaatgcctccattagatccagctgtaaggcattttctcaattagtgatcaagggggaaaggccccttgtgagtggtatcatctctgggctggtagtcttggttctataagagagcaggctgagcaagccaggggaagcaagccagtaagaagcatccctccatggcttctgcatcagctcctgctccctgacctgcttgagttccagtcctgacttccttggtgatgaacagcagtatggaagtgtaagccgaataaaccctttcctccccaactgcttcttggtcatgatgtttgtgcaggaatagaaaccctgactaagacaggtgtcctctctccttgtatgctgatccttttttaaattaatttttaaagttctcatggtgggtggtggacttcattacgacatttcttattttcaatatttatgacaatggcattgtatacatatacaatggcattgtgtgtgttcagtatgtaccattcttattcatctctctctcctgctgcccccctgcgcccactgccaacctcctgctggtcttcatcctccccagatagtctcccttcctgcctgcatgtcaccctctcgcataggggttatttctgcactcccaccatctcctttcttatacttcagtgacctcacgtgcatactcacatatatgtgcacatgctgcccacatgcacatgagtccaactagacacagttatgttcattggtctcgtttttttgtttgtttgtttgtttctgatattttgggattgcttcgcttgcttgtttcctctttgaattttgttgaaaacactcacaggttaagcagttacatttcctgaaaaccaaaacagggtgacgtacagttcctcctctgctagttgctttcctttctttcctcctttctttatggtctttaaaatacagcaatcacctatgtaaacatatatatgtgccccttgcttagatcaaatgcagagcttcattcacacggttgtgcagttgtcttttctatgaccctctctttattctgggaccctcctcaccccaatgactgctgcccagctctctcctatgtggctggcttgtacttggtgccatgtgcctctgttggcgacagtttgggttgctttagtcccttgctattaccagttctgtataaacaatcattatcaacaccatcatcatccctggttctgggttgcagggggcaacggtgggcgtggagcctgttcacaggccactgtaactctgagtgagttaggaagccctgtggaactgagacgatcagacacatctgactgacatgtaggaggacagttattaactctgaggagttggtgttgagatatgacctggttctctttggttcattctggtctttcttggagtttcctgctctcctttgggtacaattacaggcacccctatttccttttgaaccaggttcctcgtctgaggctgtggctctctgctccatggtgccttcactggctctgacgtctctgctgtccctgggctttgccctgtgtgcctccattcctgtcatgcagctacagtacgccaccttcatcctgcaagtggtcagccgctccttcctgtatggatgcaatgctgccttcctcacgctggcgtaagtgagcttagggagaaggagagttggctggccatgaagaaattgtggggtggggtgggcctgaaggtgagggtgcgtttagaagggaccgtggctgagtatggatacaggtgggaaggagggagcattaacatggaggtgagggtgtgtgtagaaggagtcgaggctggatatggatacaggtgggaaggatggaacattcacacagcagagtctctgtgtccagggagaatctctgtctactcggtgaactcttatttccctccactacccacctctgttttaactctcccagagaagaggtagaaaggtattttcccatctttgtgtccttggcactccattcttgcttcttttgataatgccagcatctgtcttttccctaagaccttcttagccttagcttagcctgggcctgagtcccttctgttcccgtagggctcaagttactacttgctctgtgtcttggggttagaactgaatagagtgggagaagaaagggcttgcatggatgggtgaagggcaggtctaggacaggggagtcggctgacaaatgttctcaagcatcaggcccctgcttggagtgggagaagttgtgtgtgtgtgtggggggggaatctgtaaaattcactgcaacctttctctacctagatttccctcagagcattttggaaagctctttgggctggtgatggccttgtcagctattgtgtctctgctacagttccccctgttcaaagtctcccctgagagcaacgctgtgtatgtgagtaccatgcagggtccatttctggccagcctgtgtgtaggccccttgactagaaaggttacccaggctggacctattgcacagggccccagcagggggcgctctaagctggctcaggaggcctggatgtgttagaggcttcagtagtgcaaaaaggaactatttagggtttcacttctcaaactagggtcacaggcagagacctggctcaagctggggcttcctaaggtcgcaggattgacacgctaccacgtctcagaaagcctggagagaagagtttgtgagtatggacaaatatgtgttactccagaataggatgcaaaatcctctcagaatttcaaagccaaagagttttctacctgtaggctaaccctgacttctacctgagactgtggcatatacgacatttgtccgaggtctctgcacgcgggagtcagtgttctgattactgatgaacctgcctgcctcattaaaaagagatcgtcagggtggagagatggctcagtgggtaagggcgcttgctagggtcctaggacccatggtggaaggaaagacttaactgttacaagttgtcctctgacctccgcatgtgctccatgacacttgaacacacacacacacacacacacacacacacacacacacacatacacacatagatacatacacacagatacacaaacacagatgtacatacacacacacacacacacacacacacacacacacaaataaatgtagtaattcttttaaagctcaaagcatagagtaagtatataagtctgtcactagaagaaacaagactatgcttagggcatcaggagccctaactcaacatctagatgtagtctaactgatgcctctccagcttcacacgggacctgggaaagctcactagtgccctctaggccattgcttcctcacccttgaaatgggtttaatagaggctggcatgtggcttattggtagagggcttgcttagcatgcacaggaccctgagttcaatcgtgagcactgactaagtcatgcatggtggtacatcctataattcctgtacttgggagatggattagactttcaaggtcagcctgagcctgtcttaagaaagaaagaaagaaagaaagaaagaaagaaagaaagaaagaaagaagccatgaaaataaacctaaagtccttcaggtcaccttaatgtctaggtagaaaataggccatagaccaagtaggactttggtccttctgttggtgatgggagtaactcagagttgctggagtggcccctctttcctgtttccccaggtatcgatggggcttgccattttcctgacattggtccatcccttcctggtgtaccgtgagtgccgtgctgagaagacaaaatcgtctgtggatgcctagtccactctctagcctcgatgatgccttttctgttcattactcgactttgatgatccagtatctacaaagactgcctccccaggagaactgtaatcggcagtcatagtttttcttaaaccactgccaccacaagaaacaaaccaac

SEQ ID NO: 58 - DNA, 2003 bp, Mus Musculus
ggccgggtctggccgagctgggctgggtctggctgagcagagcagagccgagccgggcaaagctcgacagggaggctctgggcggagggtagtggaaggcggtagcctggtggcggcgaggctgcggcgacagagatccgggagagagttgctgccggctggagcgcgacctcttgcctggtggaagctccatggttattccatggcgtttcttgctcaacccagagacagctggaacaagagggctcattgaagtcgagagcttgccaaaggaatttcccacacatcactaccagtggtcctctctgaagctcaggacaggatttgtggactcacttcacctcagaccatggcaagcaagggcttgcccctttacttggccaccttgttgactggactcttggaatgcatcggttttgctggtgtcctctttggctggacttcactgttgtttgtgttcaaagcagaaaactacttttcagagccctgtgaacaggactgcttgctccagagcaatgtaacagggccttctgatttaaaagcgcaggatgagaagttctcactcatctttaccctggcatccttcatgaataacttcatgacctttcccactggctacatctttgaccgcttcaagactactgtggcccgcctgatagccatatttttctacacctgcgccacgatcatcattgccttcacctctgcaaacactgccatgctgctcttcctagccatgcccatgctcgcagtgggaggaatcctgttccttatcaccaacctacagattgggaacctctttgggaaacaccgttcaaccatcatcaccctctacaatggagcatttgactcctcctcagcagtgttcctcgtcattaagctgctttacgagcagggcatcagcctcaggtcttccttcatcttcatgtctgtctgcagtgtctggcacattgcgcgtactttccttctgatgcccaagggacatatcccctacccactgcctcccaactacagctatggcttgtgctccaggtttggtgctagcaagaaagagaataaagcagctgaacacgaaaccaaggagctgcggtcaaaggaatgtctgccacccaaggaagagaactctggaccagaacagcagcagcagcaggagcagcagcagcagcagcagcagcagcaggagcaacacgagcaacactcttttcgacgctgcgcgctctctcgtcgattcatcttgcacgtggtgtggctgtctatcatacagttgtggcattacctcttcattggtactctcaactctctactcaccaagttatccggtggggacaaagtggaagtcagtgcctacacaaatgcctttgccatcacccagttctttggcgtgctgtgtgccccctggaatggcttactcatggaccgccttaaacagaagtatcagaaggcagccaaaaggacaggttcctcgtctgaggctgtggctctctgctccatggtgccttcactggctctgacgtctctgctgtccctgggctttgccctgtgtgcctccattcctgtcatgcagctacagtacgccaccttcatcctgcaagtggtcagccgctccttcctgtatggatgcaatgctgccttcctcacgctggcatttccctcagagcattttggaaagctctttgggctggtgatggccttgtcagctattgtgtctctgctacagttccccctgttcaaagtctcccctgagagcaacgctgtgtatgtatcgatggggcttgccattttcctgacattggtccatcccttcctggtgtaccgtgagtgccgtgctgagaagacaaaatcgtctgtggatgcctagtccactctctagcctcgatgatgccttttctgttcattactcgactttgatgatccagtatctacaaagactgcctccccaggagaactgtaatcggcagtcatagtttttcttaaaccactgccaccacaagaaacaaaccaac

SEQ ID NO: 59 - protein, 502 aa, Mus Musculus
MASKGLPLYLATLLTGLLECIGFAGVLFGWTSLLFVFKAENYFSEPCEQDCLLQSNVTGPSDLKAQDEKFSLIFTLASFMNNFMTFPTGYIFDRFKTTVARLIAIFFYTCATIIIAFTSANTAMLLFLAMPMLAVGGILFLITNLQIGNLFGKHRSTIITLYNGAFDSSSAVFLVIKLLYEQGISLRSSFIFMSVCSVWHIARTFLLMPKGHIPYPLPPNYSYGLCSRFGASKKENKAAEHETKELRSKECLPPKEENSGPEQQQQQEQQQQQQQQQEQHEQHSFRRCALSRRFILHVVWLSIIQLWHYLFIGTLNSLLTKLSGGDKVEVSAYTNAFAITQFFGVLCAPWNGLLMDRLKQKYQKAAKRTGSSSEAVALCSMVPSLALTSLLSLGFALCASIPVMQLQYATFILQVVSRSFLYGCNAAFLTLAFPSEHFGKLFGLVMALSAIVSLLQFPLFKVSPESNAVYVSMGLAIFLTLVHPFLVYRECRAEKTKSSVDA

SEQ ID NO: 60 - DNA, 40791 bp, Homo Sapiens
gctctgggagtgtgaaactgggagagacggttaagctggtgagcaaataggaaaaatatgttccctgccaacccagcggtcaaggcaaaatgcacaaatagagtgtgtgtgtccctatgccctcatgtgctgtctgtgtgtcctctgggtgctgggtgtgacattttccctaggtgggcctgagcgagtaacagcattcaactaacttggttaggggaggcagaggcaagggggctgggaggctgaaaggcagcgaggagggagggaaagacaccgctggggttctagggggttctagagggagaagtttcaagagggagaggtaaaaagggcgcgggaggctgtgagcaagggaaaagaagaaggaagtgatggagagtgggaggtctgccccagccccttccgggcgggcaggagggggcggaggcgagcaggggactgggaggggctgcgagaggcgcgaatgcgaacctggcccgtgcggaaagggcgcggagagccccggcgcggagcaggcgggtagggcgaagggtcccctttcgggcgccatggggcgccgagcgcggcctggcccctcgggctcctctgcggggagggcaggccgcaggctggagcggggtgcggaggctggcggggagcggcccccggaggctttcctggtagaagttgatgcgaggaagggcggcggggaccaggtttgcgagtcctaggcgagggtcatgggagttgggggtatttctggcagtagaatggcctgcgtcgtgactaaactagccctgtgaccttgggcaagttcctgaaatccatgggagcttttgtttcattgtcagtaaactgaagataacaccaacttggcagcgggagtttgtgtcttctgtatgaaatctccctgcctctgcacctggttgagttgctgtcattattttaggggacggtattcagaattcgagcgcaggagctccgcttctccacctgctcccggggagctattgggtaagtcgtttatctcacctgtgactccaggtggccatcaagacctgcctctctacttgccacgtggttactcaaatgcagtgcctaagatgatgtattggagtatttattccccacatttgctgccagcggccatgatcatcctgcctcttaatgcacctcacaaataactctagtctacctttccctttcccgcaggcctcctcttccagcagcctctatctttattctacaggatccagagaatcacccgctgatggtttttgcccaggcctgaaacaaccagagagctacgggaaaggaagggcttggcttgccagaggaattttccaagtgctcaaacgccaggcttacggcgcctgtgatccgtccaggaggacaaagtgggatttgaagatccactccacttctgctcatggcgggccagggcctgcccctgcacgtggccacactgctgactgggctgctggaatgcctgggctttgctggcgtcctctttggctggccttcactagtgtttgtcttcaagaatgaagattactttaaggatctgtgtggaccagatgctgggccgattggcaatgccacagggcaggctggtaagggcagggatgacttttctaaggaagttaagtctggctcccacgtggtggcaaggagcaggaaggactctgccccctgcccacccctctttctatgatgagaggaagggtcagcagctctcaccccacttgatctgggaagtgcctgggagggaggcaccagctcctgaggggtaattaggggcagccacatttcaactcagcttaagggacaagtttgcgaccgacaagctgtctgaggtggaggggagcccagcctgtgtgctcatttggcaggaaggctgggatgcatgggagaccttttttctactccagactgcaaagcccaggatgagaggttctcactcatcttcaccctggggtccttcatgaacaacttcatgacattccccactggctacatctttgaccggttcaagaccaccgtggcacgcctcatagccatgtaagtcccaaaggccagcccaggcaaaggtgggtaagaggaatccttcaggcagcagcctagcttggagtgaaatccagagtcagacagcccggccaccctgccaggcaccacacctgcagctcgctcccagcagctgttaggaacagccccaggcagcgggactctctctagacttgcccacttcaccacagccccacttccatttccttacctcgttccctgctctgcataaatgtggcttccctatcacgtgctgaattgagccggaggccagggtgacttcctgtaagggctggcttggagccagggttacaaaattagcaaaacctaaaattgctcttctcttccttcaccccaaggatccttgtcctcatcccctgcacagcctcacatccaggttgcccaggcttcatcctcatcctcctcaccgccccccctccccgccccaacagccaatcactccctaggggcttagctaataggaagtttctttggtattgccactggtggaatttcaggtcccttctgactggaggggagactgggggggtttcctgtgcagatgagtcagaaggttcgggacgtgatctcacacacagtgtgttgctgcatcctaatctcgtgctctgtggccaggctcagtggtaatcagcggcctgctgggggctgatacagctcagagcaggtgctcccagggaggcacatgtgagattggctgtcagagagagagacgggagggctggctgggcctgcctttccggaaacagccagagtaaagccagtcccttacaatttaagcctttggatgcagaatgactgtacctcagtccttcttggtccttggctccctgctacctcccctttcctccccttcctttgtcccctccctcttctccagccttaggatattgcttttttttttttactccatgccttacaagacccccaaatgctaagggagcctgataaccttgggactgtagtcctgaaatcatagcactctgagctagatcagtccgatcatttctttttatagaaaaggctcctgaggcccagagaaggacagcgccttgcccaaggtcacagagtgaggaggagttagaactcaaggccttgatttgcagaccaggcactaacccctttctccaaggggttgggctgttggggcttccaggtgggaggaccttcgctttgcccattctgtcctggctaagtcccaagccaatcacatcgtcagctgagctcattgtccaagactttccatgctagccttgggcctcagaatgagcaaaatgcactgtccatgaggtcaggaccacatctcaatctcatcgcggcttcttgcgcctggttttgagcctggggctcagaggcatcagtgcccgttgcatcccaggctgagggtgcggtcaagtcctacacttgtgggctggctgagcagaatcatgttttttctcccaggtttctccctccttgacaatattctgcttttcctgttatgtgtttcagatttttctacaccaccgccacactcatcatagccttcacctctgcaggtgagtgctgtcaggtgggtgggagggatgcaagctcagaggcacctggtggctggggcaggtgtgagcagagggctataggcaagatatacagaccacatggttattcagagatctgcagcttgaaagaatcctggaaggatcttgagctattgctggtctgtgaaaacagtttattgagaaaatgtgaaaagcaaggatgatggagagggattacttcagagagtagaatttattcaaaactttacatctggccaggtgcagtggctcactcctgtaatcccagcactttgggaggctgaggcgggtggatcatctgaggtcaggagttcaagaccagcctggccaacatggtgaaatcccttctctactaaaaaaaatacaaaaattagctggatggtggtgcgcgcctgtaatcccagccactcaggaggctgaggcaggagaattgcctgaacccaggaggcagaggttgcagtgagccaagatcacaccattgcactccagcctgggtgacaaagtgagactctaccaaaaaacaaacaaaaaaccctaaaaaacaaaacaacaacaaaaaacctttacatccttctcctatgtgttaaaatgttctctttctctttttaatgaaatgattatatgaatgaccattttgcaaatatccttacttagcagggtaaaagttgacaaccctattgtactcaaaatctttgttttaaaatttcaccagtctgttaagtctggaactccaatctggtttattttccaccacccttccacccattacacagaggagaaactgaagccacagcaggaccccttgcaaagacatgtccatggccacagagaaagcaagtgggaggtgggcctgatgtgcaggcctcctgatccctcactcttctttctgtcattgccttggttatggtggccacgagatgcctcccaatattccttcctagtgttagacccgtggctcaatttttggtttaggaaagaaagtacattactcttgtgtgtgtaagctatgctaaagctgacagcatcatgagattgtctgcactcatgctgggcaaacacagaggctgagtgtctttgttcacacagatctcatgagatggcccagcacctcaaaccaattatttcaaaccactctccttatcaaaccagcatcatctactctaaaagcctgtaaatgatttttaagcaactgaatgtggaggtggtggctgggtaatgtttgactcgtgcctgcaaatcgtctgagcaacaatcctcctcttcctccataatatagggcttttcagttttgaaaaaagcattgagcccataaggactctattgtgaaaggagtctccaacctttagtagtaggagagatgtacattttataaagacagaaattgaatggtaaactgtgtgaatactctaaaattagctcttggcagtgcttcttaaggtatagcacggtagttaagaggatgttaggggcacacgcatactacgtgaactacactaacaaacatcaaatcacctggtagaacagctattccctttttatttctctttcagtccttctgatttcatgaaagaatgtcttcatgtggggccagtgtgattttaacactgatgggaagagcaggtcttaggctttgaacattctaaggtcaaatgcatccagctacaattgaataacattgttttcctttcattgtatttattttgacagttactttctattcatgacaagtaatgccagtgttttcatctacagtagtgatataaagtgtcctttaaaaatagatactttttggataaaagtgagtcaacttaaaacattttagcaaataataggacaggcataggttgtggccagaataatggtgggcagaagtctggtttggggaggaagaatttgtcaagggttcccctagcccagctcttgagcttttttgctgtggtctcacacttaccagacctgttataaccatttgtttgcatgtcagtctatttaagggcaaggactatctgattcatcttgcatttccagtgccaagcacaatgcctggcaccaaagaagtgctcagagtttagtgaacaaagaaaagaccatggtccttttctcactcagttctcatagcacctgagacaggaagagcaggaactgttgttcccattaaacagatgattgaagctcaaggccaataccatgaattagggaatgggctagagggttgagccagggacctgagtccagggtcttcttttccaggagtgtcaaggatgaaagggagaggcagcttgtggtttactgagggaagagagaggtggcttcacttagagctctgcctctgtctgtagacttcctggcctgccacagactgaggaccaactttggttgggaagaaggtggctcagaagacttccacagagatatctggggaagccttggccggtatcctaaaaacccttgaaggacgctggaacgctggctagaattggggcctggataccaggattgttgggaatttggagcaggtgggagcagagtttggggctccatgtttgggttgcactatgacaccaccctacctctgactttgatggtccaggctcagccgtgctgctcttcctggccatgccaatgctcaccattgggggaatcctgtttctcatcaccaacctgcaggtgggagccttccctaatcccaggcactcggcagggtggcgggaaggtggagggaaggagagacccttttctataattggctgcctcagatggggttggcccaagctgaggtgggagctctagcggtggagggtgagtttgggtataaggagggtctgccacatgctgggtgctcaggaagtatctgtttcatgaataaataagtgatccaggctagtcctatcatccccagattgggaacctatttggccaacaccgttcgaccatcatcactctgtacaatggagcatttgactcttcctcggcagtcttccttattattaaggtaaatatagcaacagcctacattcactgggcacttgtatatgccagacacttgtcttgtgaacctgcattatttgtctccatcaactcggtgaggtaggtactgtgttacccccattttacagatgaagcatttgagtctctgaggttaaaaagcttgttgaaggttctgcagctagtagccatgatactggaacttgaacccaggcttgtcggttctagagcctgagcttgtaaccgctaagccccttcttcagacttgcccaagcttttgtggcagtggtcataatgtgcttgggccagtgttgggtagaggctgggggacctttagagtggggcgtttgctgctgtgagcttctagtttggacaagaaggtggcaagtggctagtgggtacagcaggggcagacacagaggcttgtccagctgtcccagtggctgatgttggggtatcaggggatgaactgttgccaaggctattagaggtcaatcaacaaccattctgtcttattcattgcgaacagttttatctgggcagtgacccgcttagcccaggggatgaatcctgattgattaaagccaaccatggcaatccatttacccgttgctagtgataggtggaggtcagcatatgatccagtcctttttaatgagataaagggagtgtatatagtggaagattcaaggggacttttcttccctgacgcaaggtgaaagcagagtaaaaacaaagtcttcctcattgaatgttgtggtgtgaggatgtgatagctggagttgtggcaaccatgcttcaattatgaggcagcaagctggaggactaaagccagcacaccacagatggctgagtgaaaggaagggaagagtgtggatctcaagccatccaacctgggacttctctctgggcttagtgttaggtcacaggcagttggcactgcctgcaggttatgggggcagagaagaggatctctggcagtcaccacccagacatgagtctagcttagtcccataagctttggaggtttggagggttatgcagagactgagcccctgaggcactcaagcctttctactcctggcataagagtcactttctgggttctccctccttcccctggagaacccagatggctgcctcatctttctttcctctctcttttttttttttttttattattgagttggagtctcactttgtctcccaggctggagtgcattggtgggatcttggctcactgcaatctctgcctagtgggtttaagcaattctcctgcctcagcctcctgagtagctgggactataggcgtgccaccacagtcagcttatttttgtatttttagtagagatggggtttcgccatgttggccaggctggtcttgaactcttgacctcaagtaatccgccttccttgacctcccaaagtgctgaaattacaggcatgagccaccatgcccagcctctctcctgtctctctagagttggaaggggaaagggagcaggaacaggaattcttagtttaatctgactttgctgctgcttactctgtcaatttattgagcaattcactgcacctctctggacctcaacgtcactctctgtaaaatgggaggaggttgggctaggtcggtggttttcaaactgagctgttgaggaacttagggattctctttgatgtcataccagtcaccaaggagaataaagagggagatgactggcaagctccccattggtgtgttttgtaagatgaatttttgtgtaaaattttctttgaacaaaaggcctttgctgtcgttgggggaaaaaaggcactgggctagaagatctctggggagccacacgaggaggctccaccggctgtggggatgggtcgtatgaggactcctctactgccgggtgtgtcttggggtgggtgggggcatgtgtgtaccaggtgtccctaatcagcttacaggatagtaggtgatggcttgtactaggactccttagaaaacagggttccagcccctgcctcttctgctgatgtttttgtatgcaataaaatatacataacataaaatttactatcttaacctttttttttttttgagacagagtctcgctctgttgcccaggctggagtgcggtggcaggatcttggctcactgcaacctccgcctcccgggttcaagcgattctcctgccttaaccacccgagtagctgggattacaggtgcgtgccaccatgccccactaatttttgtattttcagtagagacggggtttcaccatgttggccaggctggtctggaactcctggcctcaggtgatctgcttgcctcagcctcccaaagtactgggattacaggcatgtaatcatgtaatcatatcctctcacctcagcctcccaagtagctggaattacaggcgtgcaccatcacgcccagctgatttatttatttatttttagtagagatgaggtcttgctgtttcccaggctggtctcaagctcctggactcaagcaatcctcctgtcttggtcttctaaagcactagaattacaggcaggaaccactgagcttggccctgcatagtgctcttaaagttcatccatgttgcagcatgtgtcagaatttctttcctttccttttttttttttatttggaggcaaggtcatgtttcattgtccaggctggggtgcagtggcccagtcatgactcactgcagcctcaaacttctgggctcaagaaatcctcccactcagcctcctgagtagctggcactacaggtgtatgccaccacacccagctaattaaataaaaattttctagagaaggggtgagggtctcactatgttgtcaaggctggtcttgaactgggctcaggtgatcctcgtgcgtcccaaagtgctgggattgtaggtgtgagccagcatggttgcctctttccttttttaaggctgaataatattccattgtgtgtatagatcacattatgtttagctgttcatctgctgatggacccttagtttgcttccatcctttggctattgtgaatagtgctgctatgaacgtgggtgtgacactgactttttccttctccttctgcagcttctttatgaaaaaggcatcagcctcagggcctccttcatcttcatctctgtctgcagtacctggcatgtagcacgcactttcctcctgatgccccgggggcacatcccatacccactgccccccaactacagctatgggtaaggactatctggtgattgtgggccagagcccctcattggccctagggtgggatggacagggtaaagcaaacctatcacaggagaggaggaggactggagcagtgcatctgttagctattgctgcataacaaactatctcaaaactcagcagcctaaaatgttaagcatttattatttttcacaagtctgtgggtagctggctagttccgctgatcagggccagatgtagatgattttgacagggctcattcatacatctgatcatttggaggattacatgggggctggctatgctaggatggcctcactcacataggtttggagtgacagggatgcctgggtcacgtggctgtcatcctccagcaagccagcgtgggctcattcacaccgtgatttcagggttctgaaagagtgcagaaatgcacaagcgttcttgagatttaagcttggaattggcacagccacttctgctgcattcttttggctgaagcagttcacaaggctggcccagattcagggcatggggaaatagagctgcagtctcattcaaattgggggaaatacagaggaggtgaagaaatgtgatcatttttgcagtcatttgccacaaggagtagaggaagggcattcctttgctgctcacttactaattgtcagaccccatgtgctctctgatttcatcctcacaataatcctctgagatatccttatctccattttctaaatgcaaaaaatgaggctcagaagggttaagtctgagccatctttctgttgctaggaagaggcagagctgggatttgaacctgggcctgccctactcttttcatgcttcctaaactttgctgcttattagaatcactagattcacatagagatcttagaaaaggaagcctggctctcacctccagacattctgatttaactggtctggtctgcaacctgggcatcagagtggctaaaaggtgattccaaagtgcggtggaatgtgggattcaccatgctattccctccagtctgagtctcaggttcggctcacagtccttggccttgctggtggggcttttgtttccatagcctgtgccctgggaatggcaccacaaaggaagagaaggaaacagctgagcatgaaaacagggagctacagtcaaaggagttcctttcagcgaaggaaggtgagccctgctggctaacccatctctcctccagacccaagcctctccttgtgcctttcctggcccctcacctccagagctcccccagggacccagaatcaggaaaggcaggacagaaaaagggccttaggcatcttcccaaccctctcacttaatggagggtccagggctttcgtctcttttctgtccctcttttctctatttcgcatcctatcacttccccaccccttgaagcccgcctgccatgggttgccttcccttccccccactcctcggttctgccctcttctgtgatgccattgcactaagtctggtacagtgcccccatttctccaggtctcctgggtccgccctctcttattgtcccaactctatcactgcttcctttccttcctctctgttctgcgtctttggttacacacatcacaaaccgcagctagctacagtagaaataagaacggggtgggagaggagatgggagatgcaggtcgaaggacaaaaaggagcagatgagcaggatgaacaggcctagagatctaatgcacagcacgaagactgtaggtcatcaaactgcattgtgtttgggactttcctaaacaagtagattttaactgctcttgtcacaaaacaggtagaaatgtgagatgatggatatgttaatttgcttaactgtagtaaccatcttagtagctatatgtatcctatgacctcatattgtatatcttaaatatacagaataaaattgatttttttgtttttatttttaccatctgacaattggatccaaaacatgtatttatttatttattttaaagaaagaagaatagggttctgggaagcttccaaaatcaagggaggacattgaacttgccagggtgtaggacctattttagattaagtccatcctaatctaaactcatggccggtctgccttgttaggaggaaccatctcattggttaaccttgagagaggaacagaacactgaattcatggtcccatctggaccatgaagattagggtagaggaagatttcccaaagaaactcaggatactggtatcaaaagaaagggaggtgctgaggagcaggttagaacagagtatccacactcattctcctctcccttctgactttctcctctccttgtcgttcctttcacctttctcgctgagaaagatcaggaaggtattactgcaagaagtgtcattgaccaggctgtgagagacagatcggatttcaatagagaagaacacagagggtcatccaaggtggtagggccagcatgacaaagcagggaggtggggatgtgtgagtccgaggcaggtgcagagcacgccgggtgagttctgggagccaagggtagaaggtgggcccggatctgaaatgttccattgaagcctccacactccccatcctacctgtccactttcctcgtaattcacgcccagatcctcctctccccattagagaccccaggggcagggcagaagcaggaactccgctccttctggagctacgctttctctcggcgctttgcctggcacctggtgtggctgtctgtgatacagttgtggcactacctcttcattggcactctcaactccttgctgaccaacatggccggtggggacatggcacgaggtatgtggtagggctgggaggtagcccatctgcatgtcccagctgggaacacagagcctcccagcagggctgtacacaccagaggagggtctgatggtgtggggaggagggacatgcagacaagggtaaggtgggagagtccctgcctggaagggagttttggaaacttctcatcaaccaacctctctcttccttctgcagtcagcacctacacaaatgcctttgccttcactcagttcggagtgctgtgtgccccctggaatggcctgctcatggaccggcttaaacagaagtaccagaaggaagcaagaaagacaggtgagatgcgggggagggcaggggctggtcagggaaccaggaagggaggtcttcatttaccccatgacatcttctctcgctcttttttttttttttttttttttttttgtgatagagtcttactctgttgcccaggctggagtgcagtggtgtgatctcagatcattgcagcctgcacctcctgggttcaagagattctcctgcctcagcctcccaagtagctgggattacaggcgtgtgccaccatcccccactaatttttgtctttttagtagagacggggtttcaccatgtcaggctggtcttgaactcctgacctcgggtgatctgcccgcctcagcctcccaaaatgctgggataacaggcgtgaagcaccatgcctggtcttctcttttgttcttaaccctgtctagttgcactcattcattcattaaaacactagtcactgagtgatagttatgtgtcagccatggtgccagacaccagggattcaatgacagacaagatagatgtgttctttttctcaaggtgttctcagtctagagggtggagaaaggcaggtagtcaggcagttataatccgtgaagcaaacccacagggggccatggggggcacaaagaagcgcacataatctgttctaggtgaggatgggattggtgtcagggaaggcttcctggagggaatggcacctaagccaagacctgaaggatgagtaaggagggaggagatgaagaggcggggccttggagagtggcccaggagcacagtggggtcaaaatggtgaatgagagagtgaaacattgaggaatctgggcagatgagtcgggctggctagggcacagagcactggggaatcttagggaagtggctggagagagagaggtaagaaggggtcaggctgtttaccacatcagggagttttggcctgatccttggacctggttggaggagtagaggtatgctgaggtattttaacctgctgggtcaggagggacaaaagtagactaacattttgcatacttatttcatctatcccttcccccacccatgcacctgcttctcccacacctgctagagttttcaaagcaaatctcagacatcgtatcatttcatccgtaaatatttctctatacccgtacatgtatctctaacaaataaggcctcttttacttaaacatcaccataaaatcatgatcacacctaaaaaataacaataatttcttcatatcatctactgtgcagtcactgttcaaattcctccaatcatttcaaatacatccttttacagttggtttgttccaattaggatccatgcctggtccatgcagtgtatttggttgctgtgtcttctatagcttttaaaatctagaacagtcctcccccctaccttttcttgtttatttgttgaagaaactgggtcatttccccatattttggatttggcgttgttttaatgtgtcatttaaaagtattcctttccttgggtatttcctgtaaacaacaggattagaagcttggaggaaacgcagtttaatttttttttttttttttttgccgtgaataactcagtggtagagctatgggtttcctctgttctcctgtcagcagcccctggtgtctgttgtcttgttacgatgttaagattgatcaactggtttagacattgcgagtctgatccatccactataaagtttcccatcaaccatatacttagtgattttaggagccattaatgatcaatgcctaggcccattatttcattaggatcgcaaaaggatgattttcttttctttctttttttttttttgagacagagtctcactgtgttgcctaggctggagtgcagtggcgtaatctcagcctactgcgacctccgcctcccaggttcaagcgattctcctgcctcagcatcccgagtagctggcattacaggcacccactacctggctaatttttgtatttttagtagagatggggtttcaccatgttggccaggctggtctcaaactcctgatctccagtgatccacctgccttggcctcccaaagttctgggattacagccactgcccctggccaaaaggatgattttctatttctatcttctacttttaatcactagaattcttctagaaagaaaaacattccttactattttgttacccagaaataaatgcttggcttacacatttatttaccagtttgaaatatgagttggtgccctagtgaccttcagggatggctactaattgtttcttttataatatttcattttaaaatatatttgacatgttttaatctgttctgtcatgattcttcttgatgctcaaattgtctcacctttggccattgaaaactttaccagcccagaatctgtgtcttttagatgaaatcacattatttctagagagtttccttactttctaacacaattaaatgttcaggtccatttcactaggtgtgtttcttgccctagacatgaaattgtcatttttcccaactagccctgggtttctttaattggaaatggtagagactacagtctggatgctgaggttttttattgctcctgggttgtcactgcttttgggttttggatagagttaacatatatataatttttttataagaaaaatatcataaatacttaatactgatatttttattcaaatttttatttccttgattttacatttgtagccctttctcttcctctgataaacttggttcctaacatatgcatatgtaaatgtacatacacatatatagtattttaaatataattactggttttaccaatattgatgttacttgataacaatacaattgctaaatactgttgctacttctttgtttccttttttctgtccttccttattcctttctcatccttaggatatatcccattagagatgtacagtcaaattgccatattttcttctttatttttagggatgaggtctcactctgttgcccaagctggagtacagtggtacgatcacggctcactgcagcctcaacctcctgggctcaagtgatcctctcccttcagcctcccaagtagcttggactacaggcatgcactaccatgtctggctaatttaaaataattttttttttttttttttttttttttttttttttgtagaggaagggtctttgttgcccaggctgatgtctaactcctgagctcaagcaatcctcttgccctggcctcccaaagtgttgggattgtgggtgtgagccaccacactgggccaaattactgattttaagggtcactaatttggtatagagttatgttcattgatttcattttattttgtttctgatttttaaagattgttttacttgttttcttcctattattattttattttatttgtaaaacatttacatatcagacatttacattttcccaaaggtaaaactgtgaaacaagatatattcaaagaagtttactttccctctctgtttcttgtaccccttttcctcttctttaggtaaccatttttatttttttaaatataaacattgtgtaggtgtatatacatgtattagtctgttttcatgctgctgataaagacctatctgagactgggaagaaaaagaggtttaattggacttacagttccacatggctggcaaggcctcagaatcatggcaggaggtgaaaggcacttcttacacggtggtggcaagagaaaaatgaggaagaatcaaaagtggaaacccctgataaacccatcagatctcgtgagatttattcactatcacaagaatagcgtgggaaagactggcccccatgattcagttaccctcccccactgggtcccacccacaatacgtgggaattctgggagatataattcaacgtgagatttgggtggggacacagccaaaccatatcaatacatttccctctcttttagataaaaggtagtatactgtatacactattctgcagagttttttttttttttgatgtaactctatcctgagggtgctctgtagcagggacctctcatgccttttaaccactgcctgggtctccattacatggctgcagcatagttgccacagcattcctgtactgatgactatttggattgtttccagtcttttgctattaccagtagtgttacaaagaggatctggctacatgttcagggtggggaggggcagatgtgtagcctgtcaggagggtattgcagtaatccatgactgagttaatggtagtttaaagctaggatgagtcagtggggttggagagaagtgggcacatttgaatgatatgtaggaggtgaatgatcagcattattgatgagtttgaggtggggcatgtggggaaaggattcgaggatgactcccaggtttctgttgggacagtggatggatagtggctcctcccctttttccaatcttccttggcccttcgctgacttctgttgggttggcctacagagagcttctttttcctctctgttcgcccaggttcctccactttggcggtggccctctgctcgacggtgccttcgctggccctgacatccctgctgtgcctgggcttcgccctctgtgcctcagtccccatcctccctctccagtacctcaccttcatcctgcaagtgatcagccgctccttcctctatgggagcaacgcggccttcctcacccttgcgtaagtggccttggggcgggctctgtggagacggacacactggggcaaagagaagctggaggtaaagaaattgggaggcaaggcggggcctggaggcagtcaggtgcgggagactgggtttgggggcaggtgtggagggggtgagaccagaggtggtgggaaggatagaacattcatgcacttgagcctttacatctgcggtgccctctccctctgttttctacctggtgaactcgtattcatcctctgaggcccacttctgtttcagttctccagggaagaaatggaaaagtgtcttcccttctttgtgcccttagtactctagtcttacttcctttgctagtgcgtgcattgtctggcatgccatccatttacatgcctgtcttttctttcctggtgcagcctgcatgagggtcctgtctgtttttccagggccccgcatgtgccttcttctgggttctgtgggtcaaatgtctgagcagagctgaagagggaaaggccagacaggtgtggttggagggcaggcctaggacaggggagctggggacaagcggccgacagcccccagaggccaggcttctgcttggagggagggtccctgaagctcactggaacccctctggtttctctccccagtttcccttcagagcactttggcaagctctttgggctggtgatggccttgtcggctgtggtgtctctgctccagttccccatcttcaccctcatcaaaggctcccttcagaatgacccattttacgtgagtactgggaggatggggatccctggcaggaggcctgggccttaggccttggctgccccaaatctggctgtgatggcctgggtatgtagcatggtgcagcttcccaaagggtctgtgttattcaagtatttggggcaaaagtatttgtgtgtgtggggaaacagacattctggagtagggtggggaattctcacgaaacttcaagcaaaatcctgagacctcaaaggtgtttcctgcttgtggtgagtgcaggcccaccctggcctctcccctaggcccacacagggtttccacagttggccccagggacaggacctctgtgctttcacctctgtgtccttacacctggagggatgctctgaggtcctgctctaggaggtggtcgtgagtctcctgctctttgcagaaactgaggctcaaagaggttacttacgtgttcagaggcaccagctaaggagcaaaagtcaactttgaattctgtgttttgactactgcacagctctatttgcctcattttttatttttaaagcagcaaatcttagaataggagtttaaatccatcacttggagaaaagaaagactaaatgttttttgtttttgttttggagacacgatcttgctttgtcacccaggctggagtgcagtggcacaatctcggctcactgcagcctcgatctcctggactcaagcgatcctctcatctcagcctcctgagtagctgacactacaggcatgtgccaccatgccaagcttattttattttatttttttgatagacactggggtttcgctatgttgcctgggctggttttgaattcctggcctcaagcgatccacccgtctctgccttccaaaatgctgtgattacaggcgtgaaccactgtgcatggccaaaagagtaaacttgaaatctgaggcgaatgacttgattgtgacatcaggtgacctagtaatcagctgtgtattctagctggtgcctctaccagcttcccatgtgaccttgaacatgtcattgaatgctcgctaggcctctgtttctttatctgtgaaatgggcttgatattcctcctctaccccaaccgatagtgcagaatgaaaagtaactgaaagtccttcctccagggcaccatagtgtctgggtgaaaagtagaatataaactcggtagacttctggtcccttcattggtcatggaatggaccagtgcttgcttcattgagcaacagttctgttgttcagaattcctggatttcacctcacttctgctctccctgcaggtgaatgtgatgttcatgcttgccattcttctgacattcttccacccctttctggtatatcgggaatgccgtacttggaaagaaagtccctctgcaattgcatagttcagaagccctcacttttcagccccgaggatggttttgttcatcttccaccacctttgaggacctcgtgtcccaaaagactttgcctatcccagcaaaacacacacacacacacacacacacacaaaataaagacacacaaggacgtctgcgcagcaagaaaagaatctcagttgccaagcagattgatatcacacagactcaaagcaaaggcatgtggaacttctttatttcaaaacagaagtgtctccttgcacttagccttggcagacccttgactccaggggagatgacctgggggaggaagtgtgtcaactatttctttaggcctgtttggctccgaagcctatatgtgcctggatcctctgccacgggttaaattttcaggtgaagagtgaggttgtcatggcctcagctatgcttcctggctctccctcaagagtgcagccttggctagagaactcacagctctgggaaaaagaggagcagacagggttccctgggcccagtctcagcccagccactgatgctggatgaccttggcctgaccctggtctggtctcagaatcacttttcccatctgtaaaattgagatgaattttggtgttgaaagttcttcctggagcagatgtcctagaaggttttaggaatagtgacagagtcaggccaccccaagggccatgggagccagctgacctgcttgaccgaaggatttctgacagactatctttggggatgttttcaagaagggatataagttatttactttgggcatttaaaagaaaatttctctcgggaataattttatagaaaaataaagcttctgtgtctaaggcaactactgtttccatctctctaggctttgggccggggctgtgtgtgtgtgtgtgtgtgtgtttgtgtgtatgtgtatgtttctgaggaggccctaccctggcatgagagggtagggaatctggctacacatctagtgtggcagctggacccagaggtggggcaggaaccctgactatgattcaccccgctggtcctgggatgtgggcccagagacttcctcccccaggaacccctctgcttcctcttcctctccacatccttaactaactttagcagaaccctactcctcactacacacccccagctagaagcgctggatggaatcagaaattcctagtttgagtttcaattctgcccctcagcagctgggcaagccccttaaccactctgagtcactagttccccacctgcaaagtgcagttaatcatttctatctctgatggcgattgtgagaatgtaaagtcattgcaactgcctagcacatggtaggagcacatgagggtttgctcctgtgtttactcatgacccttggggaggacgggggcaaagagggagaagttgagggtgcaggaggagagatggcaggtgggtgggatgggagaatctggggcacacctgctgtctcattcccaccttgctaggagagggactaggaaagaacagtgggaggcagggggatgggggtggaaggcagggggtggcaggcaggttcatccatccattcattcaacaaatgtttattgagcacctgccacgtgtcaggccctgtcctgggtgctggggctataaagatgcagaagggtctgaaacccagctcttccttcttcctgtggatgtcggggtgtaatttccaggggccaggagcctgggtctgagggcggacaccaaagttctagtggtgtctattagcagcgtttaaatctaatggatggatttggtcttgttaccctgctcaaaagctttcagcagctccccactgtccacaggacaaaaatccagatgctagcctggcattcaaggctgtcactagtgtgatctcaacctctccccttccctctttacctcctaccaacagcggggcagagcccacccctgtggaccaagattcccagtctctgggtctgtgtgtgcaccagttcctctgcgtgggtggctcaccctgcctcagcttgtgaaatccatctggtctgctgggatcctgctcaaaatgtcatcttctccaaaaatcattactcaggctttccagcatgtctgagtccctggcacttggtcacacccttcctggtgactggcatttgcctccacatcatgaccctcccaccccttgcctgggcagcatactccaggaggcaaggtctgttctcgcctggctctaattaatctgtgcttaccatccacatggtaccagctaattcttgttgaatgaatgatcgttgaatgagtggattcttgttttggcctcagaaccaattagaaggagccagaaaaacacatgggggtgggggaggtgcagtgtggtgcagtggaaaaaaacccttctggaaatctcagctctgtcacttactttgtcagctctgtgactttggatggaccacttctttgtcagtatggtgggagaaatagacatgcctctctgggctgttgtaaggattacaaattaggtcgagtgcttggcatgtggtgggttgaacagatcacagctagcattacagatgatatattaaagccaaaaaaagatgcctaatgtccaccagttggtgaacggacaaaggaaatgtaccatatttgggatattatttggcaatcaaaaaaagtactgacacctgctacaacacggatgaatcttgaaaacattagactaagtgaaagaagccagacacaagaaactgctaatgattccatttaaatatgaaatatcgggccagggtgcagtggctcatgcctgtaatcccagcactttgggatgccaaggtgggcagatcacttgaggccaggagttcgtgaccagcctggccaacatggcgaaaccccgtctctactaaaaattagccgagtgtagtggcatgcacctgtaatcccagctacttggttggctgaggcacaagaattggttgagcctggcaggtggaggttgcagtgagccaagatcgtgccactgcactccagcctggatgacacagtgaggttccgtctcaaaaaaaaaaaaaaaaaaggaaaaagaaaaaaagaaatttccagaataggccaatctgtagaggcagaaagtagattcatgattgggtaggcctgggtgtggaggccatgggtagtgatggctaatggggaaggggtttcttttggggtgatgaaaatgggtggacttatggtatgttaattatacctcaataaaactgttatttaaaggaagaaaagatgcctggattccccaggaagtgtacagtagacttctgtgagaatcagaaatgatttctggggaagatgggcgagaggagagtaagtgggagaagtgaccacgtgcgcaactctcatcgttctgccctgagagccttcctcctgcaactttatttatttatttattttgaaacaggttctcactctgttaccctggctggagtgcagtggtgtgatctcagctcactgcagcctcgacctgccaggctcaagcaatcctcctgtttgagctcctgagtagctgggactacaggcgcatgccaccacatctggctaatcttttatttatttatttatttatttatagagattggggagtctcactctgttgctcaggctggtgtcaaacgcctggactcaagtgatcctcccaccttggcctcccaaagtgttgggattatgggtgtgagccactgtacctggcacctcctgcaacttcttcctcaagtggaaccaatgaggaagcaagcaactcagagctttcacaagttttgatttcaatcagcaacgggcttccaatgcaacccttctctcctgtaaccagcctcagtagagaggaactggaggtgaattggcccccatcacacccccacagtgccaagctgggcccttccatcagggggagaacacatgccgtgtaagggacagccaacagcataaaataggaattgtgtgatgatcccttttaagcctattcagcccagggaagtgcatatgatcagccccatttcatagatgaagaaagtcaggttcacccattagcacattgtggggctggtatttaaaccaggtctgtctggctcccaaggtcacattcatttagacattacctttactttacatttcttcttcttttcttcttcttcttcttcttcttcttcttcttcttcttcttcttcttcttcttcttcttcttcttcttcttcttcttcttcttcttcttcttcttcttcctcttcttcctcttcttcctcttcttcctcttcttcctcttcttttcttcttcctcttcttcctcttcttcctcttcttcttcttcttcttcttcttcttcttcctcttcttctttcttcttcttcttcttttttttttgaggtggggtcttgctctattgcccaggttgaatgcagcatcatcatacctaaatgcagccttgaactcctggccttaagcaatccccctgcctcggcctccaaaagtgccaagatttcaggcatgagccaccatgcccagcctgcatttattctcttgtaagaaagatatcatttaaaacagacgagaaaataaagagggacatgaaaaagacgcatcaccattaattggaccactcagagataatcatggttaacatgttggtatgttccctcccgtcatttgactggatgtatgtgataatttaaatgatctcataagcttttccttatgtaatcaaatagtagccaaaaacatgattttaaatggctgctcacaaccccatctcgtggttctgccacgccttgtttatccccatccaccccctactccctttccccttccctgcctgtgtgggggtcctagatgacggtgagccagagggcagccttggtcagcagattggagagtgcaaataataaaaacactcagaaggcgagctgttgtcaagtgggcttatcacaaaagagcaccttgggatattccagagaatgacctcatacccgctaatcactatccataatctggtgctaactgtactttagctgaaggtgctggcaggtcctgcccaggtgctgctaagaacacttctattctgtgagaatcagagatgatttctagggaaaatgggcgagagggagtaagcaggagaaacaacccacaggcacagctctcatctttctgccctgagagccttcctcctgccacgtggttttgtttgtttgtttgtttgtttgtttcagatagggtctcactctgtcacccaggctggagtgtagtggcaagatcatggctcactgaagcctcgacctcccaggctcaagcagtcctccccaaattcaaagcttggagtgatggtcccagtggttatgtctaggagccctttttcctgccagcccctcaggggattgatgactctcaaatgcttcaggtgtgacatgggcacagcagtgagtcattcctctgacattctttgggaagaacattttccatccaggcttccaggcataagatccagtcctctggtgataaggagttcacagacaggacaatgtctgagtgtatcttaaacccaggaccatggcttgtgttcacaccagaccctccagggattttgaggtgttttgtttgtttgtttgtttgtttgtttgttttttgagacagagtctctctctgtcgccaggctggagtgcagtggcacgatctcagctcactgcaaccttcgcctcccggttcaagcgattctcctgtctcagcctcctgagtagctgggactacaggtgtgcaccaccacacccggctaatttttgtatttttaatagagactgtgtttcaccatgttggacaggatggtcttgatctcttgacctcgtgatcctcccgcctcggcctcccaaaatactgggattacaggcatgagccaccgtggcccgcccaattttgagtttttatgttctaatcccaaacatctgctcacaggcccctcagcatattctttcctgggtccagtgtcacctcccaggcctgcaggctggctagagcagtagggtgtgtgggaaagctctgggctttgcaggcactgatcagctgtgtgaccttaaccaccctgaacctcagtttcctcacctgtaatggaaataggtaccacggcagtttgttgcaaggactagagagtaaccttgggaataaaaggtagcagcagcttgggctctggagatggactgtccaagaccaacttccagttcctccccacacaagctctggcacttagattcctggtacctccgctgcttcatctgtaaaatggagtaacaataggaatactttatagagttgtaaggattgagtggctggatgaacgtcaagcacttcaaaggggacctggcatgtagtgagtgatcaatataaaccacctggcttgtagcaggtgtgctgtgtgtggctgcaggtgttattagtaacatctgtgtgcccttcagagcgtgcaccacacttcacaccttgtggagtctggaatgccactattatagttcaggatagaaaacctccctgcaagcactcgctttagcttgtctccactgaacaaaacaacacaagttctttattacttggaatgggaaaacttcaaaggcaaaaaaaaaaaaagactttcgagttaccccaaatcttaagccaaagtcaatgaaaaatatcaatcttcatattcaatttttgcgatacttttgtctccccagcagtcaatggagagaatccaagcacacagaaatgtcaattaccaggggcagggctatgaattcctttcagagccctgggctggggaagagtgcaggcagacagatctgggtcctgttatcacgttcttagattgggtgtccttgtaggagtcatgaagcatcttagtgcctttgtttgctacctataatgcctacctcagagagtaataaggataagtaaggctctacgtgaaaagtgctcggccctggcacatagtaggtccttcattaatggcagctactaatttttattacatacgcaaaatcacattacaggtcaagtacgctacatgacagtgaaacagtttttttgtttgtttgttttgagacagagtctcgctctgtcacccaggctggagtgcagtggcacgatcttggctcaccgcaacttctgccttcaagcaattctcctgtctcagcctcccgagtagctgggattacaggcatgtgccaccacgccagctaattttttttggtatttttagtagagacggggtttcaccatattggccagactggtctcaaactcctgaccttgtgatctgcccaactcagactcccaaagtgctgggattactggcatgagccaccgcacctggctgtgaaacagttttattgtgtttctgtggaatgtgtcctacccaacctatagctaactcctatagttccctcagttctcagctcagatatcccttcctttctgtactgttacctagtactggttttcatagcaccaggtacctctctggcatagagcttgtcacagttgcagtttaatgtaccatcataggattttaaaaatattcagttgtgtcttccattaggctttcatttgggaactccacgcaggcagcagctgtatattttgtattgcctactgtatcctgagaactttgtaccctacttagcacagaatggaggctcagtaaatactggacatgagagagagagagagagagagaggagagggagagagagagagagagattcaacctacaatcccagctctgagcttctagttccctgatggtgaggactgtgatgtgtctcacacggtaatgagcacttatgcagaagaggctcagaaaatttctcctcatggccaacggaagacttagagttcttttccaagctccaccgtttgctggcatgcaaaatttggactatcacttaagttttccaagccttgctttttctatccctaacataggacaatattcagcattgttgtttgtttgttgggggcaccatgtttcaggcacttagtagattattgtaccaccacatttcaattggtcctcctcaagccctgcaacatctgtgaggtggtcatccttaacaactcacagatgagcaacaggagactggggggatgagggaactgccaaggaggtccagcttatgggcagcagagccaagaatggaaccagggtcttttatttttttatttttttatttttattttttaaccagggtcttttaacatccgaggaccacattctttgtgctttccaaatcatcacctgccccatgcaacttacagggtaagttacattaaacaacgtatgtaaatggctttgtgctagttattcaccaccacaggggaagtgagtcacggacaagagtgcagccgctccattcggatcctggctctgacacttacctggaaaatgacttaaccattcccaggatcagctgtttgtctgtaatttaggtagtttaatggcacttgtgtcctagagttgtttagaaggttgaataatatggagcacttaacatacttagcacctagaaacacttcctaaatattagttgctgctgttgttatcgttattaaaatttctgcctaaggtctcatttcagggagcccaactcaatctttgacaagcttaaacaaaaattgcttttcttcatttattcacttacacagcaaacatgaattgagcctgtactgtgtttccagaactgtgcaggaccagagaggcacaggtgaaggaagcaaggctctggctctactggggaaacagcaagaagattgctacaatgaggtgggaagagggctggactagagagaagccctgattagtgtccttgctacctttctctgggagagccaaggcaggcttcctggaagaggtgatccttggctgaaacttcgatgaagaaaaggaaagagcgcagtggttagggaggaaagggcattctgggcagatgaaatgacatgtgacaaaatatgggtgatcatggcatgttaggaaaatagcagggtgttcaacatgattggagcactgtgtgtgtgtggtgagggggagaattgaggttgtcaagaagtggttctcaactgagcatagttttgcctcagaggggacatttggtaatgtctgcagacattttttgattgtcacagcccagccgagaaggtactactagtatctttttggtagaggctagagaggctgctaaacatctaacaatgcacaggacaggcctctgtaacaaaaaagtatccagtcaaaaatgtccacagtgttgagaggtttaggtaagtaggcgctaaaacataaggagactgtgcctgagagcaagaaggagtaattggaaagtgctggtgtgattagctctgggttttagaaagctcattttggctgcttgtagacagtgcatcagaggtggaggagggtggtaagactggaggcagggaaagtaatttgggagccactgaaatgatccaggtgaaaaacggtcagcaggtgactaggaaagtggcagaggcaatggggatgggtggctggatgagatggtgaagaaagcactataactaactaatgtgtggatgatgggcaggaggggtgaaggatgaccagagtcctgccttgcaggtctagttggaaggtgatggtttctcctgagaaagtgaccacaaaaagtgaagcaggtttgtgcgtgtgtgtgtgtgtgtgtgtgtgtgtgtgttgagttcagtctgagatgtgttggactcacaatgtccatgggacatccaagtggagaagcatcttgggtgaccatatgtgtgagtctgcagctcagaaacaggcctggggctggagatgaagacttgggaatgatctgcgtatatatttggtagcttgagccacaagagtagatgacataacccgtggtgggtgtgcagaattaggagagacgtgcaccaagaagccaggtgatccccaatatttaaccatctggaagaataagaggagcctgccaacagaaattgggagggaatggccacaaaggctactgagaagggaagcagttcttaagaagggggaagtgaagaggtatcactactgcagaggtcaagtaggataagaactgaagaatgtctgttgggtttggcaatggggtagtcagtgggcacctgggcaaaagcagttttggtggagcaatagggataacagaaacaagactgctatggtaagaggaggaagagggtgttgaggaagtggccagcgagtctacaccacttgctggaggagcttggctttggtgcaaagcagagaagccagctcactcattgacttaacctccaagaaacacaaaatcatccatatcctggctcaaattccagcactaccaggagatggttggcccctagaaatgccatcccacttctcctctgcttatcctatcctatctgtcagtctgttgagcccaggctaagcgctacctcctcaagcaagccttctctgcctgccgtcacactttaagtgatcctgacaacactgaaaatgtgtgtctcttccattcatgttagttctacacttctgagtatctcctcaatatattgccttgttttactaatatgctcgttctgtttgccttatttatcagctaccttaaacctccctgcaactagagattctctttaagtatttgttgaataaatgaatgaatcaatcgatgatccagagcctggtagaggcttgtgtccatggtggatgaggctcagaaaatacctgtagaatcgaaataaatgcatgtgtgctctgatctaaactcagctaaactttctccagggggtaaagttcaagttgattagtcaattgattaattaattcattatgtaatggaaaaactccttctatgacctgggcagagttataggcagtgaacaagacagacaaggtccttgttgtcatgaagtttgctttctgaaggagagagataataaacaagaaaccagtaagaaagcaagattatatcattttggtaaatgttcttgtggaaataaatgtgatgatgtgtaacaaaagtaccaaataggagagtggggtgggtgggcttcttttagaaagagttctcggagaaggcttatctgaggaggtggccttttaaccagtacaaatgctttagcttggccagtggagctgggaccaggatgacaagggtcacttgtcatgccagtgagtttgagcttgtagacaagagcctgatcatgaaagactttgcagatggtggtaatgggtttgggttaattgctactatgtgggaagactttgaatgggaagcatggggacaatggcctgtgatacatgttatcaaatatggtcgcaggggctagtgaggtggcagcagagatagggagaagtagacggactggggaaggtagaagatggggcaggggaggcaattactgcaaagacatattccttctaagctcactgagtgttcatggtctctgggagcagaggttcctggaggggaaagaggataatgtcacttcctgaggaagcgggaagaacccatctgagacgtggggactgtgctggttcgtttctaaggggccttccagatctcacatgccaatcgtcttggtctatgtcaattgttggggcatccaaatggggaactgttgtccaggccgatttcacagaacaaccgcccagtccatatctcccgagccattcacccttgcagtggcgttagctctttcaccagcttttatctgccccgtggggatgttggccaagcccagttaacaagcagttgatcagccccagagatcaggtccctggagtctgtcacttttctgagggtggggagagaatcctggagcagaacatgtaactagaagggccacctggcttcctatggtctgagggagagaatggtgggatctctggcctgaatcaaacctccctttctcagtgtccatcttacctctctgctgtaccttcgttattttccagcagctcctcagcccgttcctgtgggacccttctctgccaatccctacacccactgtaaatttcaccgtgggagggagatgggccttgagggctgtattagtcttctattctgcataacaaattgcctcaaatttagcagcttcaaacaactcatgtttattagctcatcgtgagttcatcagcagtgtgggcccagcatggctaggttttctgctcagggtctcacaaggctaaaatcaagatgttgtctgggctgtgtgctcatctggagtttagggttctcttccaggctcacgtggttgtggcagaattctgttccctggagttgcagggctgaggtcctgttttcttgctgactgtcagatgagggctgctctcaggtcctcgaggctgcccacattgcttgccacgtgcgtggtcttttccatccttgaagccagtgatggagaatttcccttggattgaatcacccacatggttggactctctgacttcaggaagagagccctgtctcttttatgggatcacctgattagatcatacccatagagggcagttccttttccttaaagtcaactgtggcatgtaacatcacacaaccacaggagtaaaatccatcatatttacagtcccagggattatgcacagtgcaccaggggacaactgaattctgcctgtcaaaagggccaagcaggactttattggtgaagaacagtggaatgtcattcttggttcttccagaaaaaaatcactcagtaaagttagaggttctcttgccttttgggaagtcatcaaagaatctcatggagggtttggaccttcaccctagaaacatcacaccatgttttctataattgcagggttcatggtcccttgaagcctattcatagtttccaggttgaaaagctctgctgcagggtgtggggagggatgcaggtggaggtgagggctgaatagtgtgagctgcatatctggagctgtggtggtttttttagtctttaagctgtcatgtgttgggggttgggcatgggaggggcatcccaagagctccttggtattgacaccatctccaaggtgatctctgctctgcctggtgcacacatgtttttctcctgttgcaacagcccactcttgtagaagagcagacccctcagtaccaggtctgaccctggacagcttgtaccaggagctacagcacactcccccacaagcctaaagttgggatgagccccccgagaattagatcagaaaagattaaatgcagaggtgatctgtcaggtcccctttggaagtgctggtatggagaggattgactgagtctgtttaggaacctccaagctctgtagtaactttagggctagaaaggaggatgcctaagattcaggatcctgcagtgttgagtcaacatttcttggggaaggaggcagggctgaggattaaacggagatgatgggtatcgttctcttgctcaaaggcactggaccccaaggcctccagctcttcgctcccatttgaaattcaagtcctgagcacaccacagttgtgatgcagggaaagaatgtgcttatcagagagcctgggcaagtgggccccttgtgagtaccgttcaacctcatttatgtcattggcaccaaaagtagacatcagtctcttgaaagtttgattaatgctggtcacactcaaagaccctgggtagcattcatttactaagcaattactaaataccagtttctgtgctaaatgctgcatcagtcagggctcttaatggcaggcagcagaaactctccttggctgatctaagtagaaaaatccaggactgaaaggaaacggagtagctcatgaaattgcaggaagggccggaaaaccagacatggagccaaagtcaggctgcagaacaggtctagggaggatcccactgctgctgagacctagaccttgtgtctggcacccaggatgttgtagggctcagaccctggatcaatgtatcctgcagtgcctctgtgggtactgcaactccaggaactcaatcttgtcaacgccaccgccagagagaggccttcttggcctccatctttttggtcactagctccagattcaaaatcttgaatagatgcttcttctctttgatagagcccagtcatatgcgttagctgcaaaggaagctgaaaatctattaggaacttttgtcttcaaaaatgagaggcctgtcctccaccaagatccataggaaatggaatccaagaaaccacaggaaggggtgaggtgactgggcagctcacagcatgcatgctacatgtgaattatctcattcatttctcacactacccagtgaggtaggtattgtcatctctacttcataaatgatgatatgaggtacagaaagtttaaggaacttgcccaggacacgacacgcagctattaagtgctagacccagtcaatttgagtctgacttggactgtctgactccagaagccaccctctcagacactgctgtatacttccagtgaatgttgatgaaattttcagggttgctaagctgtggatttcagatcctggattgtatgacctaaaagagagacttccctaggagtgagggtccctgaacagtcaactggtttccaagaatgggctccctctcatcaccttatgacagtaatcctctgtccaacagccaaagaggtcctgtggggagggcttgcagatgggagtgcgcagagcccagctcaaagctcctgactaggctcttgttgagtattcctttgattcctgcttctgtctttttaaatcaatggagacaggggagggttatctccatcctcggctcaagatgaaatgcatcgttcctcgtttttctcattccttcccaatgtgtgtactgttaactttagttatgaaggaaattacagtgtcctgtgcatataccaaggctgtccaacctccacacctttgctcaagctgttccttctacttgaaatgcctgtttccttcccttctaattgcatctttccatccaggtaggaatcagctccttggttcatggagccttttctgctctgttttactatgcatggacttccttctgaattagcagaggatgtttcctagcttggtcttaacccttctccttttgtttgacctcaatttactcatcttacaaattaggttgtaagctaattgaatacaggatctatgcttcactctgattttatctccacctggatagcatcatttttgacacacaagcaggcatatgggaggggagagaagtttggtgccagaaagaactggatttgaattctaaccctgttgtttacgtgagtacgttacttaaccattaattacttcaatgtatatttattaagtacctactatgtgccgggcactgtactaagcaccaaggatacaatggtgagtaaagagatgcagccttcaccatcacgaaggaagacagatgttaatccattaaccaagtaatctcacaagaaaagtaaaatgactaactgataaggacaagcccctggagctacaagagggtgtatacagggcatcgatccaataagggcagtgttgcggggagatcaggagccacacagagcctgggttgtctcacttggaaaatggggtatcaaccacctacctcactaggtttttaaaatcaggttaaatgaggtaatacttgccatgaacagtattttgttgattgatgattgattgaaacggagtctcactctctcgcccaagctggagtgcagtggtgcaatctcagctcactgcaacctctacttcctgggttcaagtgattctcctgcctcagactcccaagtagctgggattacaggcagccacccctatgcctgactaatttttgtatttttagtagagacaaggctttgcaatgttggccaggctggtctcaacctcctgacctcaaaagatccacccacctcagcctcccaaagtgctgggatcacaggcatgagccactgcatccagccacttgccatgcatggcatttaaaaatgttcagtaaatgttaccataatgaaggctggtaggttggccaactgagtggtctgattcagaaggaaagaagttagacatacgtgaacatttcctgtacttgaagatcctcaggacagtgactcctagacccatcttccatcacagtcagctgggaagcttttaaaaaaatgcagacatctgaccttcacgctagacctattagccaagcagaagtttctgggcagggcatctgcatatttttaaaaatctttaataaggcagcctcaaaattacagattcagcacgcatttaccataaccactgaagaaatgcaaagttataaaaagaagataaacaacaatctgtctcctgctttcttccctctcctcccctgcttctggaggcaacaaggtcaactatttggtgtgattccttttagcattccctccatcaatggtcacataaggatgctcacagataagcacctatgcgggggttttttttttccttgtaaaactattcacatactaaatactttcctcagtatcttgccttttttcacttcatgtcacagaaacatctcttcaggtttatagatacaggtccagctcttcttttcatagccatataacattctgtagaatagagaggacacattttactcagtgtccgattgatggatatcaatattgttttcatttctacaaatagtcaaggaataacataactctgtaaaagttttattacttataggcgcatttatgcctaaaggatagtctcaaaagagtgaaactgatcaaatgtgcatttttttattttaataggtatggacagatttgttctcaaaatgtttgtggcagttcaaaacaccagtaaaacaggggagatatgtattttggaaaagcacccaaggcgattctgaagtgtagcccaggataagaaccattgcccagagctgttccagatggcccctgggttcctgaagtgggtatcgggagagaaatcttcactgaatgaatgagtgggctccccagggaagtgatgaaatggtccttatcagccttgctatctccctctgacagaggcaaactctctctccctgggggaagttcctccaaggcctctatataagaagtctttgtgagaggaagcaaagaaggacctgggctttgggaagatctaaagacccaggaaggtctctgggtgggtgagtgctttctctgctgtggtggagctggtgacagtttattctcccaggaggtccctggctgtggctgacagtttctggagggctggcaggcgtctacctgtggctttcaggttatgaggatgtcagcaggggcagccttcatcctctgccttgcacattccttctgcgggatgtgaaagtgctccttggctggggaaaggagatggtggagacatggaggagggtgtgggtggcttcttgaactctgaggaggggacataccttctaagtcctatgtgttcctaggaaagccaataatcattgcttctcccgccttttttatgtcatagactctgagggacccattaagtacaaacaaataagcgtaatagtcccttctttacttccgggcctgaaggaaagccagcctcagccacccctcagggtttgctgcgttctgtttagaaagaggtccttgcgtcctggatcctggagcatcaggagctgggcttggcatgagcttttctggcccatcctgatttctattcaggccttctttttctccacctcactcccacggtcccctaatggtgtgattgtgatgtgtgtgcatgtgtgtctgtgtgtgtcaatgacaaactgtgttctccgttgcaggataaagccaagatgaaactccccttacttctggctcttctatttggggcagtttctgctcttcatctaagtaagtgttttttgccttcagtctttctttctctgttttttccctttctatggtagatggggtcagagttacacacccacccccttctttgatcgtcttctatttctgaatttctgtgtgcttaaagggatggggactctatggccaggagttgaaaggatttctcaaggcgtctgttatgtctgtggtcttggttctactgtgacattcccaattttgtcctttctccattatgcttactttgagcttactgagtgccttctctcctttaactctcttagcatcgccatgaagtaggtggtattgtatacccatttcacagaaatacagctggtggatgatggaaccagtacccaagcccatgactgcccgactctaagtccatgctcttaaccaccttgaccttgtcaggcagcttgggttcccctcatagagactgggttccaggttccccttcccaggcagagttgagcactctgatgcccagggcaaggtgtgagctgtctgtggttctggggaggaacaaggggagatgtgaaggaaggacacttagctatcctccctgccagggtctgagacttccacctttgagacccctttgggtgctaagacgctgcctgaggatgaggagacaccagagcaggagatggaggagaccccttgcagggagctggaggaagaggaggagtggggctctggaagtgaagatgcctccaagaaagatggggctgttgagtctatctcagtgccagatatggtggacaaaaaccttacgtgtcctgaggaagaggacacagtaaaagtggtgggcatccctgggtgccagacctgccgctacctcctggtgagaagtcttcagacgtttagtcaagcttgggtgagtggcctatggctgaggctgaggtgggagcatggaacgggtgtgggatatgcccccagcattgctatcactggctctttttcccattgagggccctgggggtgtcagtagaacctgagcctcagagaggtgttggggtaagaggggagggccacctacaaacagaagttgcattttggtctccaaccttcaaatggttgtggcaggggagggagggaatgaattgtggggactcaagacccatgtgaattcatgtaggaaggatgctccattctttgtcttttatcctgccctgtagtttacttgccggaggtgctacaggggcaacctggtttccatccacaacttcaatattaattatcgaatccagtgttctgtcagcgcgctcaaccagggtcaagtctggattggaggcaggatcacaggctcggtaagagaagtgtgaacactaaatggggtgcacctgctgatctcagccagcactcagcttgcatcagatttgtctgtttttctcctgtataatctccagaagaaccagggatagatggacacccacagacaacactgagggggctgcctgggcattcagggaagagctaaggatttagaatcaggaggtttgggtccaagttcctttccatctctcactatctatgtaacttaagttagctgggcatggtggtgcatgtctgtaatcctagctacttgggaggctgaggcaggagagtcactggaacctgggagacagaggttgcggtgagccgagatggagccattgcactccagcctgggcaacaagagcgaaactccgcctcaaaaataaataaataaataaataaaataaaaaaaaattaaaacaagaccatgagtttgtttcctcatctctaggatgagttggcaacccttgttctaccttttgttagggctggaaggacaagcctgtcactgggatgcatagaatctgatggtgataattgccgtggatcagcatttcagatgactaggacagttcccatcatggtccagcagggaagggcccattgcccggtgggcagcagaaagagctggcagatacggggccaggtctgcttctctgccttccctctgccccatcccttcttcccctcttgctttctccagggtcgctgcagacgctttcagtgggttgacggcagccgctggaactttgcgtactgggctgctcaccagccctggtcccgcggtggtcactgcgtggccctgtgtacccgaggtgaggtggggctggggatgaacgatggaaaggtctgggagatgggaagtgccccaaggaggagatgctacaaagagcctgaccctttgtgggagaggcttcctgggtcttttatatactctgactccacagcagtgtgtgggtgggaaaagaggccctcctgtgggttgagttgggatggacaagaggctgaaagtccctttctgttctgccttcacaggaggctactggcgtcgagcccactgcctcagaagacttcctttcatctgttcctactgagctggtcccagccagcagttcagagctgccctctcctgggcagctgcctcccctcctctgcttgccatccctccctccacctccctgcaataaaatgggttttactgaaatggatttattttctcctctgatcgcggatccactctgcttagccctcattgaaacttcttccttatcatctctccccacaccacaactttcatagaagtgtcagaagctactactccttgaggaggaggatggagggtggagttgggtctatggagccttttggagatggaggaatgggctcagctagttctcttcatagaacacctgattactgggcacctgcatagtgctgccaggacctttcaaggttgtaggtagactcccaatggcccagtttgcatctctgtaaccaaaggccttttctctgtctctctccaaccccagaactgtggttggttttatatgtaaggaagttaacatgtccctgggaacagtccacaacattcaggaatgaatgtataagtaccgcaatccccggcccctcaagtggaataaatctaacatgtattgggcaccatttcccagtggcctgctgtggtagttggccttattccatgcatttttatgggctgccttcccttcctcaactgcattctctgctccttcctactctctgcaactcccaaataaacact

SEQ ID NO: 61 - DNA, 2524 bp, Homo Sapiens
gcgcggagagccccggcgcggagcaggcgggatccagagaatcacccgctgatggtttttgcccaggcctgaaacaaccagagagctacgggaaaggaagggcttggcttgccagaggaattttccaagtgctcaaacgccaggcttacggcgcctgtgatccgtccaggaggacaaagtgggatttgaagatccactccacttctgctcatggcgggccagggcctgcccctgcacgtggccacactgctgactgggctgctggaatgcctgggctttgctggcgtcctctttggctggccttcactagtgtttgtcttcaagaatgaagattactttaaggatctgtgtggaccagatgctgggccgattggcaatgccacagggcaggctgactgcaaagcccaggatgagaggttctcactcatcttcaccctggggtccttcatgaacaacttcatgacattccccactggctacatctttgaccggttcaagaccaccgtggcacgcctcatagccatatttttctacaccaccgccacactcatcatagccttcacctctgcaggctcagccgtgctgctcttcctggccatgccaatgctcaccattgggggaatcctgtttctcatcaccaacctgcagattgggaacctatttggccaacaccgttcgaccatcatcactctgtacaatggagcatttgactcttcctcggcagtcttccttattattaagcttctttatgaaaaaggcatcagcctcagggcctccttcatcttcatctctgtctgcagtacctggcatgtagcacgcactttcctcctgatgccccgggggcacatcccatacccactgccccccaactacagctatggcctgtgccctgggaatggcaccacaaaggaagagaaggaaacagctgagcatgaaaacagggagctacagtcaaaggagttcctttcagcgaaggaagagaccccaggggcagggcagaagcaggaactccgctccttctggagctacgctttctctcggcgctttgcctggcacctggtgtggctgtctgtgatacagttgtggcactacctcttcattggcactctcaactccttgctgaccaacatggccggtggggacatggcacgagtcagcacctacacaaatgcctttgccttcactcagttcggagtgctgtgtgccccctggaatggcctgctcatggaccggcttaaacagaagtaccagaaggaagcaagaaagacaggttcctccactttggcggtggccctctgctcgacggtgccttcgctggccctgacatccctgctgtgcctgggcttcgccctctgtgcctcagtccccatcctccctctccagtacctcaccttcatcctgcaagtgatcagccgctccttcctctatgggagcaacgcggccttcctcacccttgctttcccttcagagcactttggcaagctctttgggctggtgatggccttgtcggctgtggtgtctctgctccagttccccatcttcaccctcatcaaaggctcccttcagaatgacccattttacgtgaatgtgatgttcatgcttgccattcttctgacattcttccacccctttctggtatatcgggaatgccgtacttggaaagaaagtccctctgcaattgcatagttcagaagccctcacttttcagccccgaggatggttttgttcatcttccaccacctttgaggacctcgtgtcccaaaagactttgcctatcccagcaaaacacacacacacacacacacacacacaaaataaagacacacaaggacgtctgcgcagcaagaaaagaatctcagttgccaagcagattgatatcacacagactcaaagcaaaggcatgtggaacttctttatttcaaaacagaagtgtctccttgcacttagccttggcagacccttgactccaggggagatgacctgggggaggaagtgtgtcaactatttctttaggcctgtttggctccgaagcctatatgtgcctggatcctctgccacgggttaaattttcaggtgaagagtgaggttgtcatggcctcagctatgcttcctggctctccctcaagagtgcagccttggctagagaactcacagctctgggaaaaagaggagcagacagggttccctgggcccagtctcagcccagccactgatgctggatgaccttggcctgaccctggtctggtctcagaatcacttttcccatctgtaaaattgagatgaattttggtgttgaaagttcttcctggagcagatgtcctagaaggttttaggaatagtgacagagtcaggccaccccaagggccatgggagccagctgacctgcttgaccgaaggatttctgacagactatctttggggatgttttcaagaagggatataagttatttactttgggcatttaaaagaaaatttctctcgggaataattttatagaaaaataaagcttctgtgtctaaggcaa

SEQ ID NO: 62 - protein, 491 aa, Homo Sapiens
MAGQGLPLHVATLLTGLLECLGFAGVLFGWPSLVFVFKNEDYFKDLCGPDAGPIGNATGQADCKAQDERFSLIFTLGSFMNNFMTFPTGYIFDRFKTTVARLIAIFFYTTATLIIAFTSAGSAVLLFLAMPMLTIGGILFLITNLQIGNLFGQHRSTIITLYNGAFDSSSAVFLIIKLLYEKGISLRASFIFISVCSTWHVARTFLLMPRGHIPYPLPPNYSYGLCPGNGTTKEEKETAEHENRELQSKEFLSAKEETPGAGQKQELRSFWSYAFSRRFAWHLVWLSVIQLWHYLFIGTLNSLLTNMAGGDMARVSTYTNAFAFTQFGVLCAPWNGLLMDRLKQKYQKEARKTGSSTLAVALCSTVPSLALTSLLCLGFALCASVPILPLQYLTFILQVISRSFLYGSNAAFLTLAFPSEHFGKLFGLVMALSAVVSLLQFPIFTLIKGSLQNDPFYVNVMFMLAILLTFFHPFLVYRECRTWKESPSAIA

SEQ ID NO: 63 - DNA, 2415 bp, Homo Sapiens
gctctgggagtgtgaaactgggagagacggttaagctggggacggtattcagaattcgagcgcaggagctccgcttctccacctgctcccggggagctattgggatccagagaatcacccgctgatggtttttgcccaggcctgaaacaaccagagagctacgggaaaggaagggcttggcttgccagaggaattttccaagtgctcaaacgccaggcttacggcgcctgtgatccgtccaggaggacaaagtgggatttgaagatccactccacttctgctcatggcgggccagggcctgcccctgcacgtggccacactgctgactgggctgctggaatgcctgggctttgctggcgtcctctttggctggccttcactagtgtttgtcttcaagaatgaagattactttaaggatctgtgtggaccagatgctgggccgattggcaatgccacagggcaggctgactgcaaagcccaggatgagaggttctcactcatcttcaccctggggtccttcatgaacaacttcatgacattccccactggctacatctttgaccggttcaagaccaccgtggcacgcctcatagccatatttttctacaccaccgccacactcatcatagccttcacctctgcaggctcagccgtgctgctcttcctggccatgccaatgctcaccattgggggaatcctgtttctcatcaccaacctgcagattgggaacctatttggccaacaccgttcgaccatcatcactctgtacaatggagcatttgactcttcctcggcagtcttccttattattaagcttctttatgaaaaaggcatcagcctcagggcctccttcatcttcatctctgtctgcagtacctggcatgtagcacgcactttcctcctgatgccccgggggcacatcccatacccactgccccccaactacagctatggcctgtgccctgggaatggcaccacaaaggaagagaaggaaacagctgagcatgaaaacagggagctacagtcaaaggagttcctttcagcgaaggaagagaccccaggggcagggcagaagcaggaactccgctccttctggagctacgctttctctcggcgctttgcctggcacctggtgtggctgtctgtgatacagttgtggcactacctcttcattggcactctcaactccttgctgaccaacatggccggtggggacatggcacgagtcagcacctacacaaatgcctttgccttcactcagttcggagtgctgtgtgccccctggaatggcctgctcatggaccggcttaaacagaagtaccagaaggaagcaagaaagacaggttcctccactttggcggtggccctctgctcgacggtgccttcgctggccctgacatccctgctgtgcctgggcttcgccctctgtgcctcagtccccatcctccctctccagtacctcaccttcatcctgcaagtgatcagccgctccttcctctatgggagcaacgcggccttcctcacccttgctttcccttcagagcactttggcaagctctttgggctggtgatggccttgtcggctgtggtgtctctgctccagttccccatcttcaccctcatcaaaggctcccttcagaatgacccattttacgtgaatgtgatgttcatgcttgccattcttctgacattcttccacccctttctggtatatcgggaatgccgtacttggaaagaaagtccctctgcaattgcatagttcagaagccctcacttttcagccccgaggatggttttgttcatcttccaccacctttgaggacctcgtgtcccaaaagactttgcctatcccagcaaaacacacacacacacacacacacacacaaaataaagacacacaaggacgtctgcgcagcaagaaaagaatctcagttgccaagcagattgatatcacacagactcaaagcaaaggcatgtggaacttctttatttcaaaacagaagtgtctccttgcacttagccttggcagacccttgactccaggggagatgacctgggggaggaagtgtgtcaactatttctttaggcctgtttggctccgaagcctatatgtgcctggatcctctgccacgggttaaattttcaggtgaagagtgaggttgtcatggcctcagctatgcttcctggctctccctcaagagtgcagccttggctagagaactcacagctctgggaaaaagaggagcagacagggttccctgggcccagtctcagcccagccactgatgctggatgaccttggcctgaccctggtctggtctcagaatcacttttcccatctgtaaaattgaggaatagtgacagagtcaggccaccccaagggccatgggagccagctgacctgcttgaccgaag

SEQ ID NO: 64 - protein, 491 aa, Homo Sapiens; identical to SEQ ID NO: 62

SEQ ID NO: 65 - DNA, 2597 bp, Homo Sapiens
gctctgggagtgtgaaactgggagagacggttaagctggggacggtattcagaattcgagcgcaggagctccgcttctccacctgctcccggggagctattgggatccagagaatcacccgctgatggtttttgcccaggcctgaaacaaccagagagctacgggaaaggaagggcttggcttgccagaggaattttccaagtgctcaaacgccaggcttacggcgcctgtgatccgtccaggaggacaaagtgggatttgaagatccactccacttctgctcatggcgggccagggcctgcccctgcacgtggccacactgctgactgggctgctggaatgcctgggctttgctggcgtcctctttggctggccttcactagtgtttgtcttcaagaatgaagattactttaaggatctgtgtggaccagatgctgggccgattggcaatgccacagggcaggctgactgcaaagcccaggatgagaggttctcactcatcttcaccctggggtccttcatgaacaacttcatgacattccccactggctacatctttgaccggttcaagaccaccgtggcacgcctcatagccatatttttctacaccaccgccacactcatcatagccttcacctctgcaggctcagccgtgctgctcttcctggccatgccaatgctcaccattgggggaatcctgtttctcatcaccaacctgcagattgggaacctatttggccaacaccgttcgaccatcatcactctgtacaatggagcatttgactcttcctcggcagtcttccttattattaagcttctttatgaaaaaggcatcagcctcagggcctccttcatcttcatctctgtctgcagtacctggcatgtagcacgcactttcctcctgatgccccgggggcacatcccatacccactgccccccaactacagctatggcctgtgccctgggaatggcaccacaaaggaagagaaggaaacagctgagcatgaaaacagggagctacagtcaaaggagttcctttcagcgaaggaagagaccccaggggcagggcagaagcaggaactccgctccttctggagctacgctttctctcggcgctttgcctggcacctggtgtggctgtctgtgatacagttgtggcactacctcttcattggcactctcaactccttgctgaccaacatggccggtggggacatggcacgagtcagcacctacacaaatgcctttgccttcactcagttcggagtgctgtgtgccccctggaatggcctgctcatggaccggcttaaacagaagtaccagaaggaagcaagaaagacaggttcctccactttggcggtggccctctgctcgacggtgccttcgctggccctgacatccctgctgtgcctgggcttcgccctctgtgcctcagtccccatcctccctctccagtacctcaccttcatcctgcaagtgatcagccgctccttcctctatgggagcaacgcggccttcctcacccttgctttcccttcagagcactttggcaagctctttgggctggtgatggccttgtcggctgtggtgtctctgctccagttccccatcttcaccctcatcaaaggctcccttcagaatgacccattttacgtgaatgtgatgttcatgcttgccattcttctgacattcttccacccctttctggtatatcgggaatgccgtacttggaaagaaagtccctctgcaattgcatagttcagaagccctcacttttcagccccgaggatggttttgttcatcttccaccacctttgaggacctcgtgtcccaaaagactttgcctatcccagcaaaacacacacacacacacacacacacacaaaataaagacacacaaggacgtctgcgcagcaagaaaagaatctcagttgccaagcagattgatatcacacagactcaaagcaaaggcatgtggaacttctttatttcaaaacagaagtgtctccttgcacttagccttggcagacccttgactccaggggagatgacctgggggaggaagtgtgtcaactatttctttaggcctgtttggctccgaagcctatatgtgcctggatcctctgccacgggttaaattttcaggtgaagagtgaggttgtcatggcctcagctatgcttcctggctctccctcaagagtgcagccttggctagagaactcacagctctgggaaaaagaggagcagacagggttccctgggcccagtctcagcccagccactgatgctggatgaccttggcctgaccctggtctggtctcagaatcacttttcccatctgtaaaattgagatgaattttggtgttgaaagttcttcctggagcagatgtcctagaaggttttaggaatagtgacagagtcaggccaccccaagggccatgggagccagctgacctgcttgaccgaaggatttctgacagactatctttggggatgttttcaagaagggatataagttatttactttgggcatttaaaagaaaatttctctcgggaataattttatagaaaaataaagcttctgtgtctaaggcaa

SEQ ID NO: 66 - protein, 491 aa, Homo Sapiens; identical to SEQ ID NO: 62

SEQ ID NO: 67 - DNA, 2726 bp, Homo Sapiens
agggtcccctttcgggcgccatggggcgccgagcgcggcctggcccctcgggctcctctgcggggagggcaggccgcaggctggagcggggtgcggaggctggcggggagcggcccccggaggctttcctggtagaagttgatgcgaggaagggcggcggggaccaggggacggtattcagaattcgagcgcaggagctccgcttctccacctgctcccggggagctattgggatccagagaatcacccgctgatggtttttgcccaggcctgaaacaaccagagagctacgggaaaggaagggcttggcttgccagaggaattttccaagtgctcaaacgccaggcttacggcgcctgtgatccgtccaggaggacaaagtgggatttgaagatccactccacttctgctcatggcgggccagggcctgcccctgcacgtggccacactgctgactgggctgctggaatgcctgggctttgctggcgtcctctttggctggccttcactagtgtttgtcttcaagaatgaagattactttaaggatctgtgtggaccagatgctgggccgattggcaatgccacagggcaggctgactgcaaagcccaggatgagaggttctcactcatcttcaccctggggtccttcatgaacaacttcatgacattccccactggctacatctttgaccggttcaagaccaccgtggcacgcctcatagccatatttttctacaccaccgccacactcatcatagccttcacctctgcaggctcagccgtgctgctcttcctggccatgccaatgctcaccattgggggaatcctgtttctcatcaccaacctgcagattgggaacctatttggccaacaccgttcgaccatcatcactctgtacaatggagcatttgactcttcctcggcagtcttccttattattaagcttctttatgaaaaaggcatcagcctcagggcctccttcatcttcatctctgtctgcagtacctggcatgtagcacgcactttcctcctgatgccccgggggcacatcccatacccactgccccccaactacagctatggcctgtgccctgggaatggcaccacaaaggaagagaaggaaacagctgagcatgaaaacagggagctacagtcaaaggagttcctttcagcgaaggaagagaccccaggggcagggcagaagcaggaactccgctccttctggagctacgctttctctcggcgctttgcctggcacctggtgtggctgtctgtgatacagttgtggcactacctcttcattggcactctcaactccttgctgaccaacatggccggtggggacatggcacgagtcagcacctacacaaatgcctttgccttcactcagttcggagtgctgtgtgccccctggaatggcctgctcatggaccggcttaaacagaagtaccagaaggaagcaagaaagacaggttcctccactttggcggtggccctctgctcgacggtgccttcgctggccctgacatccctgctgtgcctgggcttcgccctctgtgcctcagtccccatcctccctctccagtacctcaccttcatcctgcaagtgatcagccgctccttcctctatgggagcaacgcggccttcctcacccttgctttcccttcagagcactttggcaagctctttgggctggtgatggccttgtcggctgtggtgtctctgctccagttccccatcttcaccctcatcaaaggctcccttcagaatgacccattttacgtgaatgtgatgttcatgcttgccattcttctgacattcttccacccctttctggtatatcgggaatgccgtacttggaaagaaagtccctctgcaattgcatagttcagaagccctcacttttcagccccgaggatggttttgttcatcttccaccacctttgaggacctcgtgtcccaaaagactttgcctatcccagcaaaacacacacacacacacacacacacacaaaataaagacacacaaggacgtctgcgcagcaagaaaagaatctcagttgccaagcagattgatatcacacagactcaaagcaaaggcatgtggaacttctttatttcaaaacagaagtgtctccttgcacttagccttggcagacccttgactccaggggagatgacctgggggaggaagtgtgtcaactatttctttaggcctgtttggctccgaagcctatatgtgcctggatcctctgccacgggttaaattttcaggtgaagagtgaggttgtcatggcctcagctatgcttcctggctctccctcaagagtgcagccttggctagagaactcacagctctgggaaaaagaggagcagacagggttccctgggcccagtctcagcccagccactgatgctggatgaccttggcctgaccctggtctggtctcagaatcacttttcccatctgtaaaattgagatgaattttggtgttgaaagttcttcctggagcagatgtcctagaaggttttaggaatagtgacagagtcaggccaccccaagggccatgggagccagctgacctgcttgaccgaaggatttctgacagactatctttggggatgttttcaagaagggatataagttatttactttgggcatttaaaagaaaatttctctcgggaataattttatagaaaaataaagcttctgtgtctaaggcaa

SEQ ID NO: 68 - protein, 491 aa, Homo Sapiens; identical to SEQ ID NO: 62

SEQ ID NO: 69 - DNA, 1296 bp, Homo Sapiens
gacttgattgtgacatcaggtgacctagtaatcagctgtgtattctagctggtgcctctaccagcttcccatgtgaccttgaacatgtcattgaatgctcgctaggcctctgtttctttatctgtgaaatgggcttgatattcctcctctaccccaaccgatagtgcagaatgaaaagtaactgaaagtccttcctccagggcaccatagtgtctgggtgaaaagtagaatataaactcggtagacttctggtcccttcattggtcatggaatggaccagtgcttgcttcattgagcaacagttctgttgttcagaattcctggatttcacctcacttctgctctccctgcaggtgaatgtgatgttcatgcttgccattcttctgacattcttccacccctttctggtatatcgggaatgccgtacttggaaagaaagtccctctgcaattgcatagttcagaagccctcacttttcagccccgaggatggttttgttcatcttccaccacctttgaggacctcgtgtcccaaaagactttgcctatcccagcaaaacacacacacacacacacacacacacaaaataaagacacacaaggacgtctgcgcagcaagaaaagaatctcagttgccaagcagattgatatcacacagactcaaagcaaaggcatgtggaacttctttatttcaaaacagaagtgtctccttgcacttagccttggcagacccttgactccaggggagatgacctgggggaggaagtgtgtcaactatttctttaggcctgtttggctccgaagcctatatgtgcctggatcctctgccacgggttaaattttcaggtgaagagtgaggttgtcatggcctcagctatgcttcctggctctccctcaagagtgcagccttggctagagaactcacagctctgggaaaaagaggagcagacagggttccctgggcccagtctcagcccagccactgatgctggatgaccttggcctgaccctggtctggtctcagaatcacttttcccatctgtaaaattgagatgaattttggtgttgaaagttcttcctggagcagatgtcctagaaggttttaggaatagtgacagagtcaggccaccccaagggccatgggagccagctgacctgcttgaccgaaggatttctgacagactatctttggggatgttttcaagaagggatataagttatttactttgggcatttaaaagaaaatttctctcgggaataattttatagaaaaataaagcttctgtgtctaaggcaa

SEQ ID NO: 70 - protein, 105 aa, Homo Sapiens
MPYLERKSLCNCIVQKPSLFSPEDGFVHLPPPLRTSCPKRLCLSQQNTHTHTHTHKIKTHKDVCAARKESQLPSRLISHRLKAKACGTSLFQNRSVSLHLALADP

SEQ ID NO: 71 - DNA, 2703 bp, Mus Musculus
aggagggggcggaggcgagcaggggactgggaggggctgcgagaggcgcgaatgcgaacctggcccgtgcggaaagggcgcggagagccccggcgcggagcaggcgggggacggtattcagaattcgagcgcaggagctccgcttctccacctgctcccggggagctattgggcctcctcttccagcagcctctatctttattctacaggatccagagaatcacccgctgatggtttttgcccaggcctgaaacaaccagagagctacgggaaaggaagggcttggcttgccagaggaattttccaagtgctcaaacgccaggcttacggcgcctgtgatccgtccaggaggacaaagtgggatttgaagatccactccacttctgctcatggcgggccagggcctgcccctgcacgtggccacactgctgactgggctgctggaatgcctgggctttgctggcgtcctctttggctggccttcactagtgtttgtcttcaagaatgaagattactttaaggatctgtgtggaccagatgctgggccgattggcaatgccacagggcaggctgactgcaaagcccaggatgagaggttctcactcatcttcaccctggggtccttcatgaacaacttcatgacattccccactggctacatctttgaccggttcaagaccaccgtggcacgcctcatagccatatttttctacaccaccgccacactcatcatagccttcacctctgcaggctcagccgtgctgctcttcctggccatgccaatgctcaccattgggggaatcctgtttctcatcaccaacctgcagattgggaacctatttggccaacaccgttcgaccatcatcactctgtacaatggagcatttgactcttcctcggcagtcttccttattattaagcttctttatgaaaaaggcatcagcctcagggcctccttcatcttcatctctgtctgcagtacctggcatgtagcacgcactttcctcctgatgccccgggggcacatcccatacccactgccccccaactacagctatggcctgtgccctgggaatggcaccacaaaggaagagaaggaaacagctgagcatgaaaacagggagctacagtcaaaggagttcctttcagcgaaggaagagaccccaggggcagggcagaagcaggaactccgctccttctggagctacgctttctctcggcgctttgcctggcacctggtgtggctgtctgtgatacagttgtggcactacctcttcattggcactctcaactccttgctgaccaacatggccggtggggacatggcacgagtcagcacctacacaaatgcctttgccttcactcagttcggagtgctgtgtgccccctggaatggcctgctcatggaccggcttaaacagaagtaccagaaggaagcaagaaagacaggttcctccactttggcggtggccctctgctcgacggtgccttcgctggccctgacatccctgctgtgcctgggcttcgccctctgtgcctcagtccccatcctccctctccagtacctcaccttcatcctgcaagtgatcagccgctccttcctctatgggagcaacgcggccttcctcacccttgctttcccttcagagcactttggcaagctctttgggctggtgatggccttgtcggctgtggtgtctctgctccagttccccatcttcaccctcatcaaaggctcccttcagaatgacccattttacgtgaatgtgatgttcatgcttgccattcttctgacattcttccacccctttctggtatatcgggaatgccgtacttggaaagaaagtccctctgcaattgcatagttcagaagccctcacttttcagccccgaggatggttttgttcatcttccaccacctttgaggacctcgtgtcccaaaagactttgcctatcccagcaaaacacacacacacacacacacacacacaaaataaagacacacaaggacgtctgcgcagcaagaaaagaatctcagttgccaagcagattgatatcacacagactcaaagcaaaggcatgtggaacttctttatttcaaaacagaagtgtctccttgcacttagccttggcagacccttgactccaggggagatgacctgggggaggaagtgtgtcaactatttctttaggcctgtttggctccgaagcctatatgtgcctggatcctctgccacgggttaaattttcaggtgaagagtgaggttgtcatggcctcagctatgcttcctggctctccctcaagagtgcagccttggctagagaactcacagctctgggaaaaagaggagcagacagggttccctgggcccagtctcagcccagccactgatgctggatgaccttggcctgaccctggtctggtctcagaatcacttttcccatctgtaaaattgagatgaattttggtgttgaaagttcttcctggagcagatgtcctagaaggttttaggaatagtgacagagtcaggccaccccaagggccatgggagccagctgacctgcttgaccgaaggatttctgacagactatctttggggatgttttcaagaagggatataagttatttactttgggcatttaaaagaaaatttctctcgggaataattttatagaaaaataaagcttctgtgtctaaggcaa

SEQ ID NO: 72 - protein, 491 aa, Homo Sapiens; identical to SEQ ID NO: 62

SEQ ID NO: 73 - DNA, 2781 bp, Homo Sapiens
gctctgggagtgtgaaactgggagagacggttaagctggggacggtattcagaattcgagcgcaggagctccgcttctccacctgctcccggggagctattgggatccagagaatcacccgctgatggtttttgcccaggcctgaaacaaccagagagctacgggaaaggaagggcttggcttgccagaggaattttccaagtgctcaaacgccaggcttacggcgcctgtgatccgtccaggaggacaaagtgggatttgaagatccactccacttctgctcatggcgggccagggcctgcccctgcacgtggccacactgctgactgggctgctggaatgcctgggctttgctggcgtcctctttggctggccttcactagtgtttgtcttcaagaatgaagattactttaaggatctgtgtggaccagatgctgggccgattggcaatgccacagggcaggctgactgcaaagcccaggatgagaggttctcactcatcttcaccctggggtccttcatgaacaacttcatgacattccccactggctacatctttgaccggttcaagaccaccgtggcacgcctcatagccatatttttctacaccaccgccacactcatcatagccttcacctctgcaggctcagccgtgctgctcttcctggccatgccaatgctcaccattgggggaatcctgtttctcatcaccaacctgcagattgggaacctatttggccaacaccgttcgaccatcatcactctgtacaatggagcatttgactcttcctcggcagtcttccttattattaagcttctttatgaaaaaggcatcagcctcagggcctccttcatcttcatctctgtctgcagtacctggcatgtagcacgcactttcctcctgatgccccgggggcacatcccatacccactgccccccaactacagctatggcctgtgccctgggaatggcaccacaaaggaagagaaggaaacagctgagcatgaaaacagggagctacagtcaaaggagttcctttcagcgaaggaagagaccccaggggcagggcagaagcaggaactccgctccttctggagctacgctttctctcggcgctttgcctggcacctggtgtggctgtctgtgatacagttgtggcactacctcttcattggcactctcaactccttgctgaccaacatggccggtggggacatggcacgagtcagcacctacacaaatgcctttgccttcactcagttcggagtgctgtgtgccccctggaatggcctgctcatggaccggcttaaacagaagtaccagaaggaagcaagaaagacagggtcttttaacatccgaggaccacattctttgtgctttccaaatcatcacctgccccatgcaacttacagggataaagccaagatgaaactccccttacttctggctcttctatttggggcagtttctgctcttcatctaaggtctgagacttccacctttgagacccctttgggtgctaagacgctgcctgaggatgaggagacaccagagcaggagatggaggagaccccttgcagggagctggaggaagaggaggagtggggctctggaagtgaagatgcctccaagaaagatggggctgttgagtctatctcagtgccagatatggtggacaaaaaccttacgtgtcctgaggaagaggacacagtaaaagtggtgggcatccctgggtgccagacctgccgctacctcctggtgagaagtcttcagacgtttagtcaagcttggtttacttgccggaggtgctacaggggcaacctggtttccatccacaacttcaatattaattatcgaatccagtgttctgtcagcgcgctcaaccagggtcaagtctggattggaggcaggatcacaggctcgggtcgctgcagacgctttcagtgggttgacggcagccgctggaactttgcgtactgggctgctcaccagccctggtcccgcggtggtcactgcgtggccctgtgtacccgaggaggctactggcgtcgagcccactgcctcagaagacttcctttcatctgttcctactgagctggtcccagccagcagttcagagctgccctctcctgggcagctgcctcccctcctctgcttgccatccctccctccacctccctgcaataaaatgggttttactgaaatggatttattttctcctctgatcgcggatccactctgcttagccctcattgaaacttcttccttatcatctctccccacaccacaactttcatagaagtgtcagaagctactactccttgaggaggaggatggagggtggagttgggtctatggagccttttggagatggaggaatgggctcagctagttctcttcatagaacacctgattactgggcacctgcatagtgctgccaggacctttcaaggttgtaggtagactcccaatggcccagtttgcatctctgtaaccaaaggccttttctctgtctctctccaaccccagaactgtggttggttttatatgtaaggaagttaacatgtccctgggaacagtccacaacattcaggaatgaatgtataagtaccgcaatccccggcccctcaagtggaataaatctaacatgtattgggcaccatttcccagtggcctgctgtggtagttggccttattccatgcatttttatgggctgccttcccttcctcaactgcattctctgctccttcctactctctgcaactcccaaataaacact

SEQ ID NO: 74 - protein, 603 aa, Homo Sapiens [sequence omitted]

SEQ ID NO: 75 - DNA, 2215 bp, Homo Sapiens
aatattctgcttttcctgttatgtgtttcagatttttctacaccaccgccacactcatcatagccttcacctctgcaggctcagccgtgctgctcttcctggccatgccaatgctcaccattgggggaatcctgtttctcatcaccaacctgcagattgggaacctatttggccaacaccgttcgaccatcatcactctgtacaatggagcatttgactcttcctcggcagtcttccttattattaagcttctttatgaaaaaggcatcagcctcagggcctccttcatcttcatctctgtctgcagtacctggcatgtagcacgcactttcctcctgatgccccgggggcacatcccatacccactgccccccaactacagctatggcctgtgccctgggaatggcaccacaaaggaagagaaggaaacagctgagcatgaaaacagggagctacagtcaaaggagttcctttcagcgaaggaagagaccccaggggcagggcagaagcaggaactccgctccttctggagctacgctttctctcggcgctttgcctggcacctggtgtggctgtctgtgatacagttgtggcactacctcttcattggcactctcaactccttgctgaccaacatggccggtggggacatggcacgagtcagcacctacacaaatgcctttgccttcactcagttcggagtgctgtgtgccccctggaatggcctgctcatggaccggcttaaacagaagtaccagaaggaagcaagaaagacagggtcttttaacatccgaggaccacattctttgtgctttccaaatcatcacctgccccatgcaacttacagggataaagccaagatgaaactccccttacttctggctcttctatttggggcagtttctgctcttcatctaaggtctgagacttccacctttgagacccctttgggtgctaagacgctgcctgaggatgaggagacaccagagcaggagatggaggagaccccttgcagggagctggaggaagaggaggagtggggctctggaagtgaagatgcctccaagaaagatggggctgttgagtctatctcagtgccagatatggtggacaaaaaccttacgtgtcctgaggaagaggacacagtaaaagtggtgggcatccctgggtgccagacctgccgctacctcctggtgagaagtcttcagacgtttagtcaagcttggtttacttgccggaggtgctacaggggcaacctggtttccatccacaacttcaatattaattatcgaatccagtgttctgtcagcgcgctcaaccagggtcaagtctggattggaggcaggatcacaggctcgggtcgctgcagacgctttcagtgggttgacggcagccgctggaactttgcgtactgggctgctcaccagccctggtcccgcggtggtcactgcgtggccctgtgtacccgaggaggctactggcgtcgagcccactgcctcagaagacttcctttcatctgttcctactgagctggtcccagccagcagttcagagctgccctctcctgggcagctgcctcccctcctctgcttgccatccctccctccacctccctgcaataaaatgggttttactgaaatggatttattttctcctctgatcgcggatccactctgcttagccctcattgaaacttcttccttatcatctctccccacaccacaactttcatagaagtgtcagaagctactactccttgaggaggaggatggagggtggagttgggtctatggagccttttggagatggaggaatgggctcagctagttctcttcatagaacacctgattactgggcacctgcatagtgctgccaggacctttcaaggttgtaggtagactcccaatggcccagtttgcatctctgtaaccaaaggccttttctctgtctctctccaaccccagaactgtggttggttttatatgtaaggaagttaacatgtccctgggaacagtccacaacattcaggaatgaatgtataagtaccgcaatccccggcccctcaagtggaataaatctaacatgtattgggcaccatttcccagtggcctgctgtggtagttggccttattccatgcatttttatgggctgccttcccttcctcaactgcattctctgctccttcctactctctgcaactcccaaataaacact

SEQ ID NO: 76 - protein, 502 aa, Homo Sapiens [sequence omitted]

(The sequence listing continues in the following parts.)

1-67. (canceled)

68. A method of diagnosing cancer in a patient comprising detecting the presence of differential expression of a gene in a patient sample, said gene comprising a nucleotide sequence selected from the group consisting of SEQ ID NO: 4, 10, 18, 26, 34, 44, 50, 60, 82, 88, 112, 122, 128, 136, 154, and 170, wherein the presence of differential expression of the gene in said sample is indicative of a patient who has cancer.

69. The method of claim 68 wherein the level of gene expression is determined by measuring mRNA levels, said mRNA having a sequence selected from the group consisting of SEQ ID NO: 5, 11, 13, 19, 27, 29, 35, 37, 39, 45, 51, 53, 55, 61, 63, 65, 67, 69, 71, 73, 75, 83, 89,91,93,95,97,99, 101, 103, 105, 107, 113, 115, 117, 123, 129, 137, 139, 141, 143, 145, 147, 149, 155, 157, 159, 161, 163, 165, 171, and 173, or the complement thereof.

70. The method of claim 68 wherein the differential expression is upregulation of expression of the gene as compared to a control.

71. A method of screening for anti-cancer activity comprising:
(a) contacting a cell that expresses a gene with a candidate anti-cancer agent, said gene comprising a nucleotide sequence selected from the group consisting of SEQ ID NO: 4, 10, 18, 26, 34, 44, 50, 60, 82, 88, 112, 122, 128, 136, 154, and 170; and
(b) detecting a difference between the level of gene expression in the cell in the presence and in the absence of the candidate anti-cancer agent, wherein a difference between the level of gene expression in the cell in the presence and in the absence of the candidate anti-cancer agent indicates that the candidate anti-cancer agent has anti-cancer activity.

72. The method of claim 71 wherein the candidate anti-cancer agent is an antibody, small organic compound, small inorganic compound, or polynucleotide.

73. The method of claim 71 wherein the candidate anti-cancer agent is a monoclonal antibody.

74. The method of claim 72 wherein the antibody is a human antibody or humanized antibody.

75. The method of claim 71 wherein the polynucleotide is an antisense oligonucleotide or an siRNA.

76. A method of screening drug candidates comprising:
a) providing a cell that expresses a gene comprising a nucleic acid sequence selected from the group consisting of SEQ ID NO: 4, 10, 18, 26, 34, 44, 50, 60, 82, 88, 112, 122, 128, 136, 154, and 170, or fragment thereof;
b) adding a drug candidate to said cell; and c) determining the effect of said drug candidate on the expression of said gene.

77. The method of claim 76 wherein said gene encodes an mRNA having a sequence selected from the group consisting of SEQ ID NO: 5, 11, 13, 19, 27, 29, 35, 37, 39, 45, 51, 53, 55, 61, 63, 65, 67, 69, 71, 73, 75, 83, 89, 91, 93, 95, 97, 99, 101, 103, 105, 107, 113, 115, 117, 123, 129, 137, 139, 141, 143, 145, 147, 149, 155, 157, 159, 161, 163, 165, 171, and 173, or the complement thereof.

78. The method of claim 76 wherein said determining comprises comparing the level of expression of the gene in the absence of said drug candidate to the level of expression in the presence of said drug candidate.

79. A method of screening for a bioactive agent capable of binding to a protein, wherein said protein is encoded by a nucleic acid comprising a nucleic acid sequence selected from the group consisting of SEQ ID NO: 4, 10, 18, 26, 34, 44, 50, 60, 82, 88, 112, 122, 128, 136, 154, and 170, said method comprising:
a) combining said protein and a candidate bioactive agent; and
b) determining the binding of said candidate agent to said protein.

80. A method for screening for a bioactive agent capable of modulating the activity of a protein, wherein said protein is encoded by a nucleic acid comprising a nucleic acid sequence selected from the group consisting of SEQ ID NO: 4, 10, 18, 26, 34, 44, 50, 60, 82, 88, 112, 122, 128, 136, 154, and 170, said method comprising:
a) combining said protein and a candidate bioactive agent; and
b) determining the effect of said candidate agent on the bioactivity of said protein.

81. The method of claim 80 wherein the protein has a sequence selected from the group consisting of SEQ ID NO: 6, 12, 14, 20, 28, 30, 36, 38, 40, 46, 52, 54, 56, 62, 64, 66, 68, 70, 72, 74, 76, 84, 90, 92, 94, 96, 98, 100, 102, 104, 106, 108, 114, 116, 118, 124, 130, 138, 140, 142, 144, 146, 148, 150, 156, 158, 160, 162, 164, 166, 172, and 174.

82. A method of evaluating the effect of a candidate cancer drug comprising:
a) administering the drug to a patient;
b) removing a cell sample from said patient; and
c) determining alterations in the expression or activation of a gene in the cell sample comprising a nucleic acid sequence selected from the group consisting of SEQ ID NO: 4, 10, 18, 26, 34, 44, 50, 60, 82, 88, 112, 122, 128, 136, 154, and 170.

83. The method of claim 82 wherein gene expression is determined by measuring mRNA levels of said one or more genes, said mRNA having a sequence selected from the group consisting of SEQ ID NO: 5, 11, 13, 19, 27, 29, 35, 37, 39, 45, 51, 53, 55, 61, 63, 65, 67, 69, 71, 73, 75, 83, 89, 91, 93, 95, 97, 99, 101, 103, 105, 107, 113, 115, 117, 123, 129, 137, 139, 141, 143, 145, 147, 149, 155, 157, 159, 161, 163, 165, 171, and 173, or the complement thereof.

84. A method of diagnosing cancer comprising: a) determining the expression of one or more genes comprising a nucleic acid sequence selected from the group consisting of SEQ ID NO: 4, 10, 18, 26, 34, 44, 50, 60, 82, 88, 112, 122, 128, 136, 154, and 170, in a first tissue type of a first individual; and b) comparing the gene expression in a) to expression of the gene in a control, wherein a difference between the expression of the gene in the first tissue type of the first individual compared to expression of the gene in the control indicates that the first individual has cancer.

85. The method of claim 84 wherein the control is a known normal sample.

86. A method for inhibiting the activity of a protein, wherein said protein is encoded by a nucleic acid comprising a nucleic acid sequence selected from the group consisting of SEQ ID NO: 5, 11, 13, 19, 27, 29, 35, 37, 39, 45, 51, 53, 55, 61, 63, 65, 67, 69, 71, 73, 75, 83, 89, 91, 93,95,97,99, 101, 103, 105, 107, 113, 115, 117, 123, 129, 137, 139, 141, 143, 145, 147, 149, 155, 157, 159, 161, 163, 165, 171, and 173, said method comprising binding an inhibitor to said protein.

87. The method of claim 86 wherein the protein has a sequence selected from the group consisting of SEQ ID NO: 6, 12, 14, 20, 28, 30, 36, 38, 40, 46, 52, 54, 56, 62, 64, 66, 68, 70, 72, 74, 76, 84, 90, 92, 94, 96, 98, 100, 102, 104, 106, 108, 114, 116, 118, 124, 130, 138, 140, 142, 144, 146, 148, 150, 156, 158, 160, 162, 164, 166, 172, and 174.

88. A method of treating cancer comprising administering to a patient an inhibitor of a protein, wherein said protein is encoded by a nucleic acid comprising a nucleic acid sequence selected from the group consisting of SEQ ID NO: 4, 10, 18, 26, 34, 44, 50, 60, 82, 88, 112, 122, 128, 136, 154, and 170.

89. The method of claim 88 wherein the protein has a sequence selected from the group consisting of SEQ ID NO: 6, 12, 14, 20, 28, 30, 36, 38, 40, 46, 52, 54, 56, 62, 64, 66, 68, 70, 72, 74, 76, 84, 90, 92, 94, 96, 98, 100, 102, 104, 106, 108, 114, 116, 118, 124, 130, 138, 140, 142, 144, 146, 148, 150, 156, 158, 160, 162, 164, 166, 172, and 174.

90. A method of neutralizing the effect of a protein, wherein said protein is encoded by a nucleic acid comprising a nucleic acid sequence selected from the group consisting of SEQ ID NO: 4, 10, 18, 26, 34, 44, 50, 60, 82, 88, 112, 122, 128, 136, 154, and 170, the method comprising contacting an agent specific for said protein with said protein in an amount sufficient to effect neutralization.

91. The method of claim 90 wherein the protein has a sequence selected from the group consisting of SEQ ID NO: 6, 12, 14, 20, 28, 30, 36, 38, 40, 46, 52, 54, 56, 62, 64, 66, 68, 70, 72, 74, 76, 84, 90, 92, 94, 96, 98, 100, 102, 104, 106, 108, 114, 116, 118, 124, 130, 138, 140, 142, 144, 146, 148, 150, 156, 158, 160, 162, 164, 166, 172, and 174.

92. An isolated antibody which specifically binds to a polypeptide having a sequence selected from the group consisting of a sequence selected from the group consisting of SEQ ID NO: 6, 12, 14, 20, 28, 30, 36, 38, 40, 46, 52, 54, 56, 62, 64, 66, 68, 70, 72, 74, 76, 84, 90, 92, 94, 96,98,100,102,104,106,108,114,116,118,124,130,138,140,142,144,146,148,150,156, 158, 160, 162, 164, 166, 172, and 174.

93. The isolated antibody of claim 92 wherein the antibody is a monoclonal antibody

94. The isolated antibody of claim 92 wherein the antibody is a human or humanized antibody.
